(19) United States
(12) Patent Application Publication
(10) Pub. No.: US 2012/0196827 A1
(43) Pub. Date: Aug. 2, 2012

(54) METHYLATION MARKERS FOR EARLY DETECTION AND PROGNOSIS OF COLON CANCERS

(75) Inventors: Wim Van Criekinge, Leuven (BE); Gerrit Meijer, Leuven (BE); Josef Straub, Leuven (BE); Beatriz Pinto Morais De Carvalho, Beverly Hills (PT)

(73) Assignee: ONCOMETHYLOME SCIENCES S.A., Durham, NC (US)

(21) Appl. No.: 12/303,153

(22) PCT Filed: Jun. 12, 2007
(86) PCT No.: PCT/US07/13803

§ 371 Date: Aug. 25, 2009

Related U.S. Application Data
(60) Provisional application No. 60/812,635, filed on Jun. 12, 2006.

(51) Int. Cl. A61K 31/706; A61P 35/00; A61K 31/198; A61K 31/7068; C12Q 1/68; A61K 31/245

(52) U.S. Cl. 514/49; 435/6.11; 514/43; 514/535; 514/562

(57) ABSTRACT

Using a combination of analytic methods epigenetic silencing of markers in cancer have been determined. The cancers are generally those of the gastrointestinal tract including but not limited to esophageal, head and neck, gastric, pancreas, liver, and colon. The genes can be used for the early detection of cancer or can be used to identify adenomas that will likely progress to carcinomas. Therapeutic regimens based on the epigenetic silenced genes can be chosen and/or monitored. Kits for evaluating epigenetic silencing of these genes can be used for detection and monitoring.

[0001] This application claims the benefit of U.S. Provisional Application Ser. No. 60/812,635 filed Jun. 12, 2006, the entire contents of which are incorporated by reference herein.

[0002] The accompanying compact disk (submitted in three copies) is incorporated herein by reference. The files contained on the disk are: (1) splices.txt, 3 kb, created Jun. 8, 2006; (2) prot.fasta, 151 kb, created Jun. 8, 2006; (3) prom5000-1000.fasta, 1596 kb, created Jun. 8, 2006; (4) mrna.fasta, 854 kb, created Jun. 8, 2006; (5) 34_combinations_final.txt, 96.024 kb, created Jun. 8, 2006; and (6) 00014onco.seq.txt, 4148 kb, created Jun. 12, 2007.

### TECHNICAL FIELD OF THE INVENTION

[0003] This invention is related to the area of cancer diagnostics and therapeutics. In particular, it relates to aberrant methylation patterns of particular genes in colon cancer and pre-cancer.

### BACKGROUND OF THE INVENTION

### DNA Methylation and its Role in Carcinogenesis

[0004] The information to make the cells of all living organisms is contained in their DNA. DNA is made up of a unique sequence of four bases: adenine (A), guanine (G), thymine (T) and cytosine (C). These bases are paired A to T and G to C on the two strands that form the DNA double helix. Strands of these pairs store information to make specific molecules grouped into regions called genes. Within each cell, there are processes that control what gene is turned on, or expressed, thus defining the unique function of the cell. One of these control mechanisms is provided by adding a methyl group onto cytosine (C). The methyl group tagged C can be written as mC.

[0005] DNA methylation plays an important role in determining whether some genes are expressed or not. By turning genes off that are not needed, DNA methylation is an essential control mechanism for the normal development and functioning of organisms. Alternatively, abnormal DNA methylation is one of the mechanisms underlying the changes observed with aging and development of many cancers.

[0006] Cancers have historically been linked to genetic changes caused by chromosomal mutations within the DNA. Mutations, hereditary or acquired, can lead to the loss of expression of genes critical for maintaining a healthy state. Evidence now supports that a relatively large number of cancers are caused by inappropriate DNA methylation, frequently near DNA mutations. In many cases, hyper-methylation of DNA incorrectly switches off critical genes, such as tumor suppressor genes or DNA repair genes, allowing cancers to develop and progress. This non-mutational process for controlling gene expression is described as epigenetics.

[0007] DNA methylation is a chemical modification of DNA performed by enzymes called methyltransferases, in which a methyl group (m) is added to certain cytosines (C) of DNA. This non-mutational (epigenetic) process (mC) is a critical factor in gene expression regulation. See, J. G. Herman, Seminars in Cancer Biology, 9: 359-67, 1999.

[0008] Although the phenomenon of gene methylation has attracted the attention of cancer researchers for some time, its true role in the progression of human cancers is just now being recognized. In normal cells, methylation occurs predominantly in regions of DNA that have few CG base repeats, while CpG islands, regions of DNA that have long repeats of CG bases, remain non-methylated. Gene promoter regions that control protein expression are often CpG island-rich. Aberrant methylation of these normally non-methylated CpG islands in the promoter region causes transcriptional inactivation or silencing of certain tumor suppressor expression in human cancers.

[0009] Genes that are hypermethylated in tumor cells are strongly specific to the tissue of origin of the tumor. Molecular signatures of cancers of all types can be used to improve cancer detection, the assessment of cancer risk and response to therapy. Promoter hypermethylation events provide some of the most promising markers for such purposes.

### Promoter Gene Hypermethylation: Promising Tumor Markers

[0010] Information regarding the hypermethylation of specific promoter genes can be beneficial to diagnosis, prognosis, and treatment of various cancers. Methylation of specific gene promoter regions can occur early and often in carcinogenesis making these markers ideal targets for cancer diagnostics.

[0011] Methylation patterns are tumor specific. Positive signals are always found in the same location of a gene. Real time PCR-based methods are highly sensitive, quantitative, and suitable for clinical use. DNA is stable and is found intact in readily available fluids (e.g., serum, sputum, stool, blood, and urine) and paraffin embedded tissues. Panels of pertinent gene markers may cover most human cancers.

### Diagnosis

[0012] Key to improving the clinical outcome in patients with cancer is diagnosis at its earliest stage, while it is still localized and readily treatable. The characteristics noted above provide the means for a more accurate screening and surveillance program by identifying higher-risk patients on a molecular basis. It could also provide justification for more definitive follow up of patients who have molecular but not yet all the pathological or clinical features associated with malignancy.

[0013] At present, early detection of colorectal cancer is carried out by (1) the “fecal occult blood test” (FOBT), which has a very low sensitivity and specificity, (2) by sigmoidoscopy and/or colonoscopy which is invasive and expensive (and limited in supply), (3) by X-ray detection after double-contrast barium enema, which allows only for the detection of rather large polyps, or CT-colonography (also called virtual colonoscopy) which is still experimental, and (4) by a gene mutation analysis test called PreGen-Plus (Exact Sciences; LabCorp) which is costly and of limited sensitivity.

### Predicting Treatment Response

[0014] Information about how a cancer develops through molecular events could allow a clinician to predict more accurately how such a cancer is likely to respond to specific chemotherapeutic agents. In this way, a regimen based on knowledge of the tumor's chemosensitivity could be rationally designed. Studies have shown that hypermethylation of the MGMT promoter in glioma patients is indicative of a good response to therapy, greater overall survival and a longer time to progression.

[0015] There is a continuing need in the art for new diagnostic and prognostic markers and therapeutic targets for cancer to improve management of patient care.

### SUMMARY OF THE INVENTION

[0016] According to one embodiment of the invention, a method is provided for identifying colorectal cancer or predisposition to colorectal cancer. Epigenetic silencing of at least one gene listed in Table 1 is detected in a test sample. The test ample contains colorectal cells or nucleic acids from colorectal cells. The test sample is identified as neoplastic or predisposed to neoplasia.

[0017] Another embodiment of the invention is a method of reducing or inhibiting neoplastic growth of a cell which exhibits epigenetic silenced transcription of at least one gene associated with a cancer. An epigenetically silenced gene is determined in a cell. The epigenetically silenced gene is selected from the group consisting of NM_{—}145059.1, NM_{—}183244.1, NM_{—}145341.2, NM_{—}080672.3, NM_{—}002630, NM_{—}003383, NM_{—}005504, NM_{—}016269, NM_{—}006988, NM_{—}021637, NM_{—}001888, NM_{—}014899, NM_{—}145341, NM_{—}001752, NM_{—}014142, NM_{—}001145, NM_{—}016013, NM_{—}017590, NM_{—}152429, NM_{—}138340, NM_{—}052968, NM_{—}183244, NM_{—}199423, NM_{—}015111, NM_{—}002181, NM_{—}005637, NM_{—}030790, NM_{—}018144, NM_{—}004232, NM_{—}030912, NM_{—}145059, NM_{—}033338, NM_{—}006834, NM_{—}003014, NM_{—}001343, NM_{—}000963, NM_{—}004385, and NM_{—}002899. Expression of a polypeptide encoded by the epigenetic silenced gene is restored in the cell by contacting the cell with a CpG dinucleotide demethylating agent, thereby reducing or inhibiting unregulated growth of the cell.

[0018] Another embodiment of the invention is a method of reducing or inhibiting neoplastic growth of a cell which exhibits epigenetic silenced transcription of at least one gene associated with a cancer. An epigenetically silenced gene is determined in a cell. The gene is selected from the group consisting of NM_{—}145059.1, NM_{—}183244.1, NM_{—}145341.2, NM_{—}080672.3, NM_{—}002630, NM_{—}003383, NM_{—}005504, NM_{—}016269, NM_{—}006988, NM_{—}021637, NM_{—}001888, NM_{—}014899, NM_{—}145341, NM_{—}001752, NM_{—}014142, NM_{—}001145, NM_{—}016013, NM_{—}017590, NM_{—}152429, NM_{—}138340, NM_{—}052968, NM_{—}183244, NM_{—}199423, NM_{—}015111, NM_{—}002181, NM_{—}005637, NM_{—}030790, NM_{—}018144, NM_{—}004232, NM_{—}030912, NM_{—}145059, NM_{—}033338, NM_{—}006834, NM_{—}003014, NM_{—}001343, NM_{—}000963, NM_{—}004385, and NM_{—}002899. A polynucleotide encoding a polypeptide is introduced into the cell. The polypeptide is encoded by said gene. The polypeptide is expressed in the cell thereby restoring expression of the polypeptide in the cell.

[0019] According to yet another aspect of the invention a method of treating a cancer patient is provided. A cancer cell in the patient is determined to have an epigenetic silenced gene selected from the group consisting of NM_{—}145059.1, NM_{—}183244.1, NM_{—}145341.2, NM_{—}080672.3, NM_{—}002630, NM_{—}003383; NM_{—}005504, NM_{—}016269, NM_{—}006988, NM_{—}021637, NM_{—}001888, NM_{—}014899, NM_{—}145341, NM_{—}001752, NM_{—}014142, NM_{—}001145, NM_{—}016013, NM_{—}017590, NM_{—}152429, NM_{—}138340, NM_{—}052968, NM_{—}183244, NM_{—}199423, NM_{—}015111, NM_{—}002181, NM_{—}005637, NM_{—}030790, NM_{—}018144, NM_{—}004232, NM_{—}030912, NM_{—}45059, NM_{—}033338, NM_{—}006834, NM_{—}003014, NM_{—}001343, NM_{—}000963, NM_{—}004385, and NM_{—}002899. A demethylating agent is administered to the patient in sufficient amounts to restore expression of the epigenetic silenced gene in the patient's cancer cells.

[0020] Still another embodiment of the invention is another method of treating a cancer patient. A cancer cell in the patient is determined to have an epigenetic silenced gene selected from the group consisting of NM_{—}145059.1, NM_{—}183244.1, NM_{—}145341.2, NM_{—}080672.3, NM_{—}002630, NM_{—}003383, NM_{—}005504, NM_{—}016269, NM_{—}006988, NM_{—}021637, NM_{—}001888, NM_{—}014899, NM_{—}145341, NM_{—}001752, NM_{—}014142, NM_{—}001145, NM_{—}016013, NM_{—}017590, NM_{—}152429, NM_{—}38340, NM_{—}052968, NM_{—}183244, NM_{—}199423, NM_{—}015111, NM_{—}002181, NM_{—}005637, NM_{—}030790, NM_{—}018144, NM_{—}004232, NM_{—}030912, NM_{—}45059, NM_{—}033338, NM_{—}006834, NM_{—}003014, NM_{—}001343, NM_{—}000963, NM_{—}004385, and NM_{—}002899. A polynucleotide encoding a polypeptide is administered to the patient. The polypeptide is encoded by the epigenetic silenced gene. The polypeptide is expressed in the patient's tumor, thereby restoring expression of the polypeptide in the cancer.

[0021] The invention also provides a method for selecting a therapeutic strategy for treating a cancer patient. A gene whose expression in cancer cells of the patient is reactivated by a demethylating agent is identified. The gene is selected from the group consisting of NM_{—}145059.1, NM_{—}183244.1, NM_{—}145341.2, NM_{—}080672.3, NM_{—}002630, NM_{—}003383, NM_{—}005504, NM_{—}016269, NM_{—}006988, NM_{—}021637, NM_{—}001888, NM_{—}014899, NM_{—}145341, NM_{—}001752, NM_{—}014142, NM_{—}001145, NM_{—}016013, NM_{—}017590, NM_{—}152429, NM_{—}138340, NM_{—}052968, NM_{—}183244, NM_{—}199423, NM_{—}015111, NM_{—}002181, NM_{—}005637, NM_{—}030790, NM_{—}018144, NM_{—}004232, NM_{—}030912, NM_{—}145059, NM_{—}033338, NM_{—}006834, NM_{—}003014, NM_{—}001343, NM_{—}000963, NM_{—}004385, and NM_{—}002899. A therapeutic agent which increases expression of the gene is selected for treating said cancer patient.

[0022] The present invention also provides a kit for assessing methylation in a cell sample. The kit provides in a package: (1) a reagent that (a) modifies methylated cytosine residues but not non-methylated cytosine residues, or that (b); modifies non-methylated cytosine residues but not methylated cytosine residues; and (2) a pair of oligonucleotide primers that specifically hybridizes under amplification conditions to a region of a gene selected from the group consisting of NM_{—}145059.1, NM_{—}183244.1, NM_{—}145341.2, NM_{—}080672.3, NM_{—}002630, NM_{—}003383, NM_{—}005504, NM_{—}016269, NM_{—}006988, NM_{—}021637, NM_{—}001888, NM_{—}014899, NM_{—}145341, NM_{—}001752, NM_{—}014142, NM_{—}001145, NM_{—}016013, NM_{—}017590, NM_{—}52429, NM_{—}138340, NM_{—}052968, NM_{—}183244, NM_{—}199423, NM_{—}015111, NM_{—}002181, NM_{—}005637, NM_{—}030790, NM_{—}018144, NM_{—}004232, NM_{—}030912, NM_{—}145059, NM_{—}033338, NM_{—}006834, NM_{—}003014, NM_{—}001343, NM_{—}000963; NM_{—}004385, and NM_{—}002899. The region of the gene is within about 1 kb of said gene's transcription start site.

[0023] These and other embodiments which will be apparent to those of skill in the art upon reading the specification provide the art with tools and methods for detection, diagnosis, prognosis, therapy, and drug selection pertaining to neoplastic cells and cancers.

### BRIEF DESCRIPTION OF THE DRAWINGS AND TABLES

[0024] FIG. 1. Amplification of genes for quality control of integrity of DNA with primers as follows: AF4 exon 3 (primers SEQ ID NO: 794, 795); AF4 exon 11 (primers SEQ ID NO: 796, 797); PLZF exon 1 (primers SEQ ID NO: 798, 799); RAG1 exon 2 (primers SEQ ID NO: 800, 801); and TBXAS1 exon 9 (primers SEQ ID NO: 802, 803). See Example 2.

[0025] Table 1. Methylation markers for early detection and prognosis of colon cancer or pre-cancer.

[0026] Table 2 is contained on the compact disk which is incorporated herein. Table 2 shows the nucleotide sequences of the methylation markers.

[0027] Table 3 is contained on the compact disk which is incorporated herein. Table 3 shows the amino acid sequences of the methylation markers.

[0028] Table 4 is contained on the compact disk which is incorporated herein. Table 4 shows the promoter regions of the methylation markers.

[0029] Table 5 is contained on the compact disk which is incorporated herein. Table 5 shows combination of markers that can be used.

[0030] Table 6 is contained on the compact disk which is incorporated herein. Table 6 shows the splice variants of the markers.

### DETAILED DESCRIPTION OF THE INVENTION

[0031] The inventors have discovered a set of genes whose transcription is epigenetically silenced in cancers and pre-cancers. All of the identified genes are shown in Table 1.

[0032] Epigenetic silencing of a gene can be determined by any method known in the art. One method is to determine that a gene which is expressed in normal cells is less expressed or not expressed in tumor cells. This method does not, on its own, however, indicate that the silencing is epigenetic, as the mechanism of the silencing could be genetic, for example, by somatic mutation. One method to determine that the silencing is epigenetic is to treat with a reagent, such as DAC (5′-deazacytidine), or with a reagent which changes the histone acetylation status of cellular DNA or any other treatment affecting epigenetic mechanisms present in cells, and observe that the silencing is reversed, i.e., that the expression of the gene is reactivated or restored. Another means to determine epigenetic silencing is to determine the presence of methylated CpG dinucleotide motifs in the silenced gene. Typically these reside near the transcription start site, for example, within about 1 kbp, within about 750 bp, or within about 500 bp. After a gene has been identified as the target of epigenetic silencing in tumor cells, reduced expression of the gene can be used as an indicator of epigenetic silencing.

[0033] Expression of a gene can be assessed using any means known in the art. Either mRNA or protein can be measured. Methods employing hybridization to nucleic acid probes can be employed for measuring specific mRNAs. Such methods include using nucleic acid probe arrays (microarray technology), in situ hybridization, and using Northern blots. Messenger RNA can also be assessed using amplification techniques, such as RT-PCR. Advances in genomic technologies now permit the simultaneous analysis of thousands of genes, although many are based on the same concept of specific probe-target hybridization. Sequencing-based methods are an alternative; these methods started with the use of expressed sequence tags (ESTs), and now include methods based on short tags, such as serial analysis of gene expression (SAGE) and massively parallel signature sequencing (MPSS). Differential display techniques provide yet another means of analyzing gene expression; this family of techniques is based on random amplification of cDNA fragments generated by restriction digestion, and bands that differ between two tissues identify cDNAs of interest. Specific proteins can be assessed using any convenient method including immunoassays and immuno-cytochemistry but are not limited to that. Most such methods will employ antibodies which are specific for the particular protein or protein fragments. The sequences of the mRNA (cDNA) and proteins of the markers of the present invention are provided in the sequence listing.

[0034] Methylation-sensitive restriction endonucleases can be used to detect methylated CpG dinucleotide motifs. Such endonucleases may either preferentially cleave methylated recognition sites relative to non-methylated recognition sites or preferentially cleave non-methylated relative to methylated recognition sites. Examples of the former are Acc III, Ban I, BstN I, Msp I, and Xma I. Examples of the latter are Acc II, Ava I, BssH II, BstU I, Hpa II, and Not I. Alternatively, chemical reagents can be used which selectively modify either the methylated or non-methylated form of CpG dinucleotide motifs.

[0035] Modified products can be detected directly, or after a further reaction which creates products which are easily distinguishable. Means which detect altered size and/or charge can be used to detect modified products, including but not limited to electrophoresis, chromatography, and mass spectrometry. Examples of such chemical reagents for selective modification include hydrazine and bisulfite ions. Hydrazine-modified DNA can be treated with piperidine to cleave it. Bisulfite ion-treated DNA can be treated with alkali.

[0036] A variety of amplification techniques may be used in a reaction for creating distinguishable products. Some of these techniques employ PCR. Other suitable amplification methods include the ligase chain reaction (LCR) (Barringer et al, 1990), transcription amplification (Kwoh et al. 1989; WO88/10315), selective amplification of target polynucleotide sequences (U.S. Pat. No. 6,410,276), consensus sequence primed polymerase chain reaction (U.S. Pat. No. 4,437,975), arbitrarily primed polymerase chain reaction (WO90/06995), nucleic acid based sequence amplification (NASBA) (U.S. Pat. Nos. 5,409,818; 5,554,517; 6,063,603), nick displacement amplification (WO2004/067726).

[0037] Sequence variation that reflects the methylation status at CpG dinucleotides in the original genomic DNA offers two approaches to PCR primer design. In the first approach, the primers do not themselves “cover” or hybridize to any potential sites of DNA methylation; sequence variation at sites of differential methylation are located between the two primers. Such primers are used in bisulphite genomic sequencing, COBRA, Ms-SNuPE. In the second approach, the primers are designed to anneal specifically with either the methylated or unmethylated version of the converted sequence. If there is a sufficient region of complementarity, e.g., 12, 15, 18, or 20 nucleotides, to the target, then the primer may also contain additional nucleotide residues that do not interfere with hybridization but may be useful for other manipulations. Exemplary of such other residues may be sites for restriction endonuclease cleavage, for ligand binding or for factor binding or linkers or repeats. The oligonucleotide primers may or may not be such that they are specific for modified methylated residues

[0038] One way to distinguish between modified and unmodified DNA is to hybridize oligonucleotide primers which specifically bind to one form or the other of the DNA. After hybridization, an amplification reaction can be performed and amplification products assayed. The presence of an amplification product indicates that a sample hybridized to the primer. The specificity of the primer indicates whether the DNA had been modified or not, which in turn indicates whether the DNA had been methylated or not. For example, bisulfite ions modify non-methylated cytosine bases, changing them to uracil bases. Uracil bases hybridize to adenine bases under hybridization conditions. Thus an oligonucleotide primer which comprises adenine bases in place of guanine bases would hybridize to the bisulfite-modified DNA, whereas an oligonucleotide primer containing the guanine bases would hybridize to the non-modified (methylated) cytosine residues in the DNA. Amplification using a DNA polymerase and a second primer yield amplification products which can be readily observed. Such a method is termed MSP (Methylation Specific PCR; U.S. Pat. Nos. 5,786,146; 6,017,704; 6,200,756). The amplification products can be optionally hybridized to specific oligonucleotide probes which may also be specific for certain products. Alternatively, oligonucleotide probes can be used which will hybridize to amplification products from both modified and nonmodified DNA.

[0039] Another way to distinguish between modified and nonmodified DNA is to use oligonucleotide probes which may also be specific for certain products. Such probes can be hybridized directly to modified DNA or to amplification products of modified DNA. Oligonucleotide probes can be labeled using any detection system known in the art. These include but are not limited to fluorescent moieties, radioisotope labeled moieties, bioluminescent moieties, luminescent moieties, chemiluminescent moieties, enzymes, substrates, receptors, or ligands.

[0040] Still another way for the identification of methylated CpG dinucleotides utilizes the ability of the MBD domain of the McCP2 protein to selectively bind to methylated DNA sequences (Cross et al, 1994; Shiraishi et al, 1999). Restriction enconuclease digested genomic DNA is loaded onto expressed His-tagged methyl-CpG binding domain that is immobilized to a solid matrix and used for preparative column chromatography to isolate highly methylated DNA sequences.

[0041] Real time chemistry allow for the detection of PCR amplification during the early phases of the reactions, and makes quantitation of DNA and RNA easier and more precise. A few variations of the real-time PCR are known. They include the TaqMan system and Molecular Beacon system which have separate probes labeled with a fluorophore and a fuorescence quencher. In the Scorpion system the labeled probe in the form of a hairpin structure is linked to the primer.

[0042] DNA methylation analysis has been performed successfully with a number of techniques which include the MALDI-TOFF, MassARRAY, MethyLight, Quantitative analysis of ethylated alleles (QAMA), enzymatic regional methylation assay (ERMA), HeavyMethyl, QBSUPT, MS-SNuPE, MethylQuant, Quantitative PCR sequencing, and Oligonucleotide-based microarray systems.

[0043] The number of genes whose silencing is tested and/or detected can vary: one, two, three, four, five, or more genes can be tested and/or detected. In some cases at least two genes are selected. In other embodiments at least three genes are selected. Exemplary combinations useful for testing and determining are shown in Table 5.

[0044] Testing can be performed diagnostically or in conjunction with a therapeutic regimen. Testing can be used to monitor efficacy of a therapeutic regimen, whether a chemotherapeutic agent or a biological agent, such as a polynucleotide. Testing can also be used to determine what therapeutic or preventive regimen to employ on a patient. Moreover, testing can be used to stratify patients into groups for testing agents and determining their efficacy on various groups of patients. The test of the present invention can be used in conjunction with other factors to provide a diagnosis. A skilled practitioner in the art knows that many factors are considered and weighed in making a diagnosis. These may include other genetic markers, as well as physical findings, radiological findings, histology, etc. Thus the markers of the invention may be used to aid in formulating a diagnosis. Moreover, a lab test can be performed and evaluated and a determination with respect to a marker recorded in a tangible medium, such as a paper or electronic record. Providing a diagnosis to a patient or other physician can be done by a physician in writing, orally, or electronically.

[0045] Test samples for diagnostic, prognostic, or personalized medicine uses can be obtained from surgical samples, such as biopsies or fine needle aspirates, from paraffin embedded colon, rectum, small intestinal, gastric, esophageal, bone marrow, breast, ovary, prostate, kidney, lung, brain on other organ tissues, from a body fluid such as blood, serum, lymph, cerebrospinal fluid, saliva, sputum, bronchial-lavage fluid, ductal fluids stool, urine, lymph nodes, or semen. Such sources are not meant to be exhaustive, but rather exemplary. A test sample obtainable from such specimens or fluids includes detached tumor cells or free nucleic acids that are released from dead or damaged tumor cells. Nucleic acids include RNA, genomic DNA, mitochondrial DNA, single or double stranded, and protein-associated nucleic acids. Any nucleic acid specimen in purified or non-purified form obtained from such specimen cell can be utilized as the starting nucleic acid or acids.

[0046] Demethylating agents can be contacted with cells in vitro or in vivo for the purpose of restoring normal gene expression to the cell. Suitable demethylating agents include, but are not limited to 5-aza-2′-deoxycytidine, 5-aza-cytidine, Zebularine, procaine, and L-ethionine. This reaction may be used for diagnosis, for determining predisposition, and for determining suitable therapeutic regimes. If the demethylating agent is used for treating colon, head and neck, esophageal, gastric, pancreatic, or liver cancers, expression or methylation can be tested of a gene selected from the group shown in Table 1.

[0047] An alternative way to restore epigenetically silenced gene expression is to introduce a non-methylated polynucleotide into a cell, so that it will be expressed in the cell. Various gene therapy vectors and vehicles are known in the art and any can be used as is suitable for a particular situation. Certain vectors are suitable for short term expression and certain vectors are suitable for prolonged expression. Certain vectors are trophic for certain organs and these can be used as is appropriate in the particular situation. Vectors may be viral or non-viral. The polynucleotide can, but need not, be contained in a vector, for example, a viral vector, and can be formulated, for example, in a matrix such as a liposome, microbubbles. The polynucleotide can be introduced into a cell by administering the polynucleotide to the subject such that it contacts the cell, is taken up by the cell, and the encoded polypeptide is expressed. Suitable polynucleotides are provided in the sequence listing as SEQ ID NO: 273 to 532. Polynucleotides and/or oligonucleotides encoding the polypeptides shown in SEQ ID NO: 533-793 can also be used. Preferably the specific polynucleotide will be one which the patient has been tested for and been found to carry a silenced version. The polynucleotides for treating colon, head and neck, esophageal, gastric, pancreas, liver cancers will typically encode a gene selected from those shown in Table 1.

[0048] Cells exhibiting methylation silenced gene expression generally are contacted with the demethylating agent in vivo by administering the agent to a subject. Where convenient, the demethylating agent can be administered using, for example, a catheterization procedure, at or near the site of the cells exhibiting unregulated growth in the subject, or into a blood vessel in which the blood is flowing to the site of the cells. Similarly, where an organ, or portion thereof, to be treated can be isolated by a shunt procedure, the agent can be administered via the shunt, thus substantially providing the agent to the site containing the cells. The agent also can be administered systemically or via other routes known in the art.

[0049] The polynucleotide can include, in addition to polypeptide coding sequence, operatively linked transcriptional regulatory elements, translational regulatory elements, and the like, and can be in the form of a naked DNA molecule, which can be contained in a vector, or can be formulated in a matrix such as a liposome or microbubbles that facilitates entry of the polynucleotide into the particular cell. The term “operatively linked” refers to two or more molecules that are positioned with respect to each other such that they act as a single unit and effect a function attributable to one or both molecules or a combination thereof. A polynucleotide sequence encoding a desired polypeptide can be operatively linked to a regulatory element, in which case the regulatory element confers its regulatory effect on the polynucleotide similar to the way in which the regulatory element would affect a polynucleotide sequence with which it normally is associated with in a cell.

[0050] The polynucleotide encoding the desired polypeptide to be administered to a mammal or a human or to be contacted with a cell may contain a promoter sequence, which can provide constitutive or, if desired, inducible or tissue specific or developmental stage specific expression of the polynucleotide, a polyA recognition sequence, and a ribosome recognition site or internal ribosome entry site, or other regulatory elements such as an enhancer, which can be tissue specific. The vector also may contain elements required for replication in a prokaryotic or eukaryotic host system or both, as desired. Such vectors, which include plasmid vectors and viral vectors such as bacteriophage, baculovirus, retrovirus, lentivirus, adenovirus, vaccinia virus, semliki forest virus and adeno-associated virus vectors, are well known and can be purchased from a commercial source (Promega, Madison Wis.; Stratagene, La Jolla Calif.; GIBCO/BRL, Gaithersburg Md.) or can be constructed by one skilled in the art (see, for example, Meth. Enzymol., Vol. 185, Goeddel, ed. (Academic Press, Inc., 1990); Jolly, Canc. Gene Ther. 1:51-64, 1994; Flotte, J. Bioenerg. Biomemb. 25:37-42, 1993; Kirshenbaum et al., J. Clin. Invest. 92:381-387, 1993; each of which is incorporated herein by reference).

[0051] A tetracycline (tet) inducible promoter can be used for driving expression of a polynucleotide encoding a desired polypeptide. Upon administration of tetracycline, or a tetracycline analog, to a subject containing a polynucleotide operatively linked to a tet inducible promoter, expression of the encoded polypeptide is induced. The polynucleotide alternatively can be operatively linked to tissue specific regulatory element, for example, a liver cell specific regulatory element such as an α-fetoprotein promoter (Kanai et al., Cancer Res. 57:461-465, 1997; He et al., J. Exp. Clin. Cancer Res. 19:183-187, 2000) or an albumin promoter (Power et al., Biochem. Biophys. Res. Comm. 203:1447-1456, 1994; Kuriyama et al., Int. J. Cancer 71:470-475, 1997); a muscle cell specific regulatory element such as a myoglobin promoter (Devlin et al., J. Biol. Chem. 264:13896-13901, 1989; Yan et al., J. Biol. Chem. 276:17361-17366, 2001); a prostate cell specific regulatory element such as the PSA promoter (Schuur et al., J. Biol. Chem. 271:7043-7051, 1996; Latham et al., Cancer Res. 60:334-341, 2000); a pancreatic cell specific regulatory element such as the elastase promoter (Ornitz et al., Nature 313:600-602, 1985; Swift et al., Genes Devel. 3:687-696, 1989); a leukocyte specific regulatory element such as the leukosialin (CD43) promoter (Shelley et al., Biochem. J. 270:569-576, 1990; Kudo and Fukuda, J. Biol. Chem. 270:13298-13302, 1995); or the like, such that expression of the polypeptide is restricted to particular cell in an individual, or to particular cells in a mixed population of cells in culture, for example, an organ culture. Regulatory elements, including tissue specific regulatory elements, many of which are commercially available, are well known in the art (see, for example, InvivoGen; San Diego Calif.).

[0052] Viral expression vectors can be used for introducing a polynucleotide into a cell, particularly a cell in a subject. Viral vectors provide the advantage that they can infect host cells with relatively high efficiency and can infect specific cell types. For example, a polynucleotide encoding a desired polypeptide can be cloned into a baculovirus vector, which then can be used to infect an insect host cell, thereby providing a means to produce large amounts of the encoded polypeptide. Viral vectors have been developed for use in particular host systems, particularly mammalian systems and include, for example, retroviral vectors, other lentivirus vectors such as those based on the human immunodeficiency virus (HIV), adenovirus vectors, adeno-associated virus vectors, herpesvirus vectors, hepatitis virus vectors, vaccinia virus vectors, and the like (see Miller and Rosman, BioTechniques 7:980-990, 1992; Anderson et al., Nature 392:25-30 Suppl., 1998; Verma and Somia, Nature 389:239-242, 1997; Wilson, New Engl. J. Med. 334:1185-1187 (1996), each of which is incorporated herein by reference).

[0053] A polynucleotide, which can optionally be contained in a vector, can be introduced into a cell by any of a variety of methods known in the art (Sambrook et al., supra, 1989; Ausubel et al., Current Protocols in Molecular Biology, John Wiley and Sons, Baltimore, Md. (1987, and supplements through 1995), each of which is incorporated herein by reference). Such methods include, for example, transfection, lipofection, microinjection, electroporation and, with viral vectors, infection; and can include the use of liposomes, microemulsions or the like, which can facilitate introduction of the polynucleotide into the cell and can protect the polynucleotide from degradation prior to its introduction into the cell. A particularly useful method comprises incorporating the polynucleotide into microbubbles, which can be injected into the circulation. An ultrasound source can be positioned such that ultrasound is transmitted to the tumor, wherein circulating microbubbles containing the polynucleotide are disrupted at the site of the tumor due to the ultrasound, thus providing the polynucleotide at the site of the cancer. The selection of a particular method will depend, for example, on the cell into which the polynucleotide is to be introduced, as well as whether the cell is in culture or in situ in a body.

[0054] Introduction of a polynucleotide into a cell by infection with a viral vector can efficiently introduce the nucleic acid molecule into a cell. Moreover, viruses are very specialized and can be selected as vectors based on an ability to infect and propagate in one or a few specific cell types. Thus, their natural specificity can be used to target the nucleic acid molecule contained in the vector to specific cell types. A vector based on an HIV can be used to infect T cells, a vector based on an adenovirus can be used, for example, to infect respiratory epithelial cells, a vector based on a herpesvirus can be used to infect neuronal cells, and the like. Other vectors, such as adeno-associated viruses can have greater host cell range and, therefore, can be used to infect various cell types, although viral or non-viral vectors also can be modified with specific receptors or ligands to alter target specificity through receptor mediated events. A polynucleotide of the invention, or a vector containing the polynucleotide can be contained in a cell, for example, a host cell, which allows propagation of a vector containing the polynucleotide, or a helper cell, which allows packaging of a viral vector containing the polynucleotide. The polynucleotide can be transiently contained in the cell, or can be stably maintained due, for example, to integration into the cell genome.

[0055] A polypeptide according to any of SEQ ID NO 533-793 can be administered directly to the site of a cell exhibiting unregulated growth in the subject. The polypeptide can be produced and isolated, and formulated as desired, using methods as disclosed herein, and can be contacted with the cell such that the polypeptide can cross the cell membrane of the target cells. The polypeptide may be provided as part of a fusion protein, which includes a peptide or polypeptide component that facilitates transport across cell membranes. For example, a human immunodeficiency virus (HIV) TAT protein transduction domain or a nuclear localization domain may be fused to the marker of interest. The administered polypeptide can be formulated in a matrix that facilitates entry of the polypeptide into a cell.

[0056] While particular polynucleotide and polypeptide sequences are mentioned here as representative of known genes and proteins, those of skill in the art will understand that the sequences in the databases represent the sequences present in particular individuals. Any allelic sequences from other individuals can be used as well. These typically vary from the disclosed sequences at 1-10 residues, at 1-5 residues, or at 1-3 residues. Moreover, the allelic sequences are typically at least 95, 96, 97, 98, or 99% identical to the database sequence, as measured using an algorithm such as the BLAST homology tools.

[0057] An agent such as a demethylating agent, a polynucleotide, or a polypeptide is typically formulated in a composition suitable for administration to the subject. Thus, the invention provides compositions containing an agent that is useful for restoring regulated growth to a cell exhibiting unregulated growth due to methylation silenced transcription of one or more genes. The agents are useful as medicaments for treating a subject suffering from a pathological condition associated with such unregulated growth. Such medicaments generally include a carrier. Acceptable carriers are well known in the art and include, for example, aqueous solutions such as water or physiologically buffered saline or other solvents or vehicles such as glycols, glycerol, oils such as olive oil or injectable organic esters. An acceptable carrier can contain physiologically acceptable compounds that act, for example, to stabilize or to increase the absorption of the conjugate. Such physiologically acceptable compounds include, for example, carbohydrates, such as glucose, sucrose or dextrans, antioxidants, such as ascorbic acid or glutathione, chelating agents, low molecular weight proteins or other stabilizers or excipients. One skilled in the art would know or readily be able to determine an acceptable carrier, including a physiologically acceptable compound. The nature of the carrier depends on the physico-chemical characteristics of the therapeutic agent and on the route of administration of the composition. Administration of therapeutic agents or medicaments can be by the oral route or parenterally such as intravenously, intramuscularly, subcutaneously, transdermally, intranasally, intrabronchially, vaginally, rectally, intratumorally, or other such method known in the art. The pharmaceutical composition also can contain one more additional therapeutic agents.

[0058] The therapeutic agents can be incorporated within an encapsulating material such as into an oil-in-water emulsion, a microemulsion, micelle, mixed micelle, liposome, microsphere, microbubbles or other polymer matrix (see, for example, Gregoriadis, Liposome Technology, Vol. 1 (CRC Press, Boca Raton, Fla. 1984); Fraley, et al., Trends Biochem. Sci., 6:77 (1981), each of which is incorporated herein by reference).

[0059] Liposomes, for example, which consist of phospholipids or other lipids, are nontoxic, physiologically acceptable and metabolizable carriers that are relatively simple to make and administer. “Stealth” liposomes (see, for example, U.S. Pat. Nos. 5,882,679; 5,395,619; and 5,225,212, each of which is incorporated herein by reference) are an example of such encapsulating materials particularly useful for preparing a composition useful in a method of the invention, and other “masked” liposomes similarly can be used, such liposomes extending the time that the therapeutic agent remain in the circulation. Cationic liposomes, for example, also can be modified with specific receptors or ligands (Morishita et al., J. Clin. Invest., 91:2580-2585 (1993), which is incorporated herein by reference). In addition, a polynucleotide agent can be introduced into a cell using, for example, adenovirus-polylysine DNA complexes (see, for example, Michael et al., J. Biol. Chem. 268:6866-6869 (1993), which is incorporated herein by reference).

[0060] The route of administration of the composition containing the therapeutic agent will depend, in part, on the chemical structure of the molecule. Polypeptides and polynucleotides, for example, are not efficiently delivered orally because they can be degraded in the digestive tract. However, methods for chemically modifying polypeptides, for example, to render them less susceptible to degradation by endogenous proteases or more absorbable through the alimentary tract may be used (see, for example, Blondelle et al., supra, 1995; Ecker and Crook, supra, 1995).

[0061] The total amount of an agent to be administered in practicing a method of the invention can be administered to a subject as a single dose, either as a bolus or by infusion over a relatively short period of time, or can be administered using a fractionated treatment protocol, in which multiple doses are administered over a prolonged period of time. One skilled in the art would know that the amount of the composition to treat a pathologic condition in a subject depends on many factors including the age and general health of the subject as well as the route of administration and the number of treatments to be administered. In view of these factors, the skilled artisan would adjust the particular dose as necessary. In general, the formulation of the composition and the routes and frequency of administration are determined, initially, using Phase I and Phase II clinical trials.

[0062] The composition can be formulated for oral formulation, such as a tablet, or a solution or suspension form; or can comprise an admixture with an organic or inorganic carrier or excipient suitable for enteral or parenteral applications, and can be compounded, for example, with the usual non-toxic, pharmaceutically acceptable carriers for tablets, pellets, capsules, suppositories, solutions, emulsions, suspensions, or other form suitable for use. The carriers, in addition to those disclosed above, can include glucose, lactose, mannose, gum acacia, gelatin, mannitol, starch paste, magnesium trisilicate, talc, corn starch, keratin, colloidal silica, potato starch, urea, medium chain length triglycerides, dextrans, and other carriers suitable for use in manufacturing preparations, in solid, semisolid, or liquid form. In addition auxiliary, stabilizing, thickening or coloring agents and perfumes can be used, for example a stabilizing dry agent such as triulose (see, for example, U.S. Pat. No. 5,314,695).

[0063] Although diagnostic and prognostic accuracy and sensitivity may be achieved by using a combination of markers, such as 5 or 6 markers, or 9 or 10 markers, or 14 or 15 markers, practical considerations may dictate use of smaller combinations. Any combination of markers for a specific cancer may be used which comprises 2, 3, 4, or 5 markers. Combinations of 2, 3, 4, or 5 markers can be readily envisioned given the specific disclosures of individual markers provided herein. Exemplary combinations useful for testing and determining are shown in Table 5.

[0064] The level of methylation of the differentially methylated GpG islands can provide a variety of information about the disease or cancer. It can be used to diagnose a disease or cancer in the individual. Alternatively, it can be used to predict the course of the disease or cancer in the individual or to predict the susceptibility to disease or cancer or to stage the progression of the disease or cancer in the individual. It can help to predict the likelihood of overall survival or predict the likelihood of reoccurrence of disease or cancer and to determine the effectiveness of a treatment course undergone by the individual. Increase or decrease of methylation levels in comparison with reference level and alterations in the increase/decrease when detected provide useful prognostic and diagnostic value.

[0065] The prognostic methods can be used to identify patients with adenomas that are likely to progress to carcinomas. Such a prediction can be made on the basis of epigenetic silencing of one of the genes identified in Table 1 in an adenoma relative to normal tissue. Such patients can be offered additional appropriate therapeutic or preventative options, including endoscopic polypectomy or resection, and when indicated, surgical procedures, chemotherapy, radiation, biological response modifiers, or other therapies. Such patients may also receive recommendations for further diagnostic or monitoring procedures, including but not limited to increased frequency of colonoscopy, virtual colonoscopy, video capsule endoscopy, PET-CT, molecular imaging, or other imaging techniques.

[0066] A therapeutic strategy for treating a cancer patient can be selected based on reactivation of epigenetically silenced genes. First a gene selected from those listed in Table 1 is identified whose expression in cancer cells of the patient is reactivated by a demethylating agent or epigenetically silenced. A treatment which increases the expression of the gene is then selected. Such a treatment can comprise administration of a reactivating agent or a polynucleotide. A polypeptide can alternatively be administered.

[0067] Kits according to the present invention are assemblages of reagents for testing methylation. They are typically in a package which contains all elements, optionally including instructions. The package may be divided so that components are not mixed until desired. Components may be in different physical states. For example, some components may be lyophilized and some in aqueous solution. Some may be frozen. Individual components may be separately packaged within the kit. The kit may contain reagents, as described above for differentially modifying methylated and non-methylated cytosine residues. Desirably the kit will contain oligonucleotide primers which specifically hybridize to regions within 1 kb of the transcription start sites of the genes/markers identified in the attached Table 1. Typically the kit will contain both a forward and a reverse primer for a single gene or marker. If there is a sufficient region of complementarity, e.g., 12, 15, 18, or 20 nucleotides, then the primer may also contain additional nucleotide residues that do not interfere with hybridization but may be useful for other manipulations. Exemplary of such other residues may be sites for restriction endonuclease cleavage, for ligand binding or for factor binding or linkers or repeats. The oligonucleotide primers may or may not be such that they are specific for modified methylated residues. The kit may optionally contain oligonucleotide probes. The probes may be specific for sequences containing modified methylated residues or for sequences containing non-methylated residues. The kit may optionally contain reagents for modifying methylated cytosine residues. The kit may also contain components for performing amplification, such as a DNA polymerase and deoxyribonucleotides. Means of detection may also be provided in the kit, including detectable labels on primers or probes. Kits may also contain reagents for detecting gene expression for one of the markers of the present invention (Table 1). Such reagents may include probes, primers, or antibodies, for example. In the case of enzymes or ligands, substrates or binding partners may be sued to assess the presence of the marker.

[0068] In one aspect of this embodiment, the gene is contacted with hydrazine, which modifies cytosine residues, but not methylated cytosine residues, then the hydrazine treated gene sequence is contacted with a reagent such as piperidine, which cleaves the nucleic acid molecule at hydrazine modified cytosine residues, thereby generating a product comprising fragments. By separating the fragments according to molecular weight, using, for example, an electrophoretic, chromatographic, or mass spectrographic method, and comparing the separation pattern with that of a similarly treated corresponding non-methylated gene sequence, gaps are apparent at positions in the test gene contained methylated cytosine residues. As such, the presence of gaps is indicative of methylation of a cytosine residue in the CpG dinucleotide in the target gene of the test cell.

[0069] Bisulfite ions, for example, sodium bisulfite, convert non-methylated cytosine residues to bisulfite modified cytosine residues. The bisulfite ion treated gene sequence can be exposed to alkaline conditions, which convert bisulfite modified cytosine residues to uracil residues. Sodium bisulfite reacts readily with the 5,6-double bond of cytosine (but poorly with methylated cytosine) to form a sulfonated cytosine reaction intermediate that is susceptible to deamination, giving rise to a sulfonated uracil. The sulfonate group can be removed by exposure to alkaline conditions, resulting in the formation of uracil. The DNA can be amplified, for example, by PCR, and sequenced to determine whether CpG sites are methylated in the DNA of the sample. Uracil is recognized as a thymine by Taq polymerase and, upon PCR, the resultant product contains cytosine only at the position where 5-methylcytosine was present in the starting template DNA. One can compare the amount or distribution of uracil residues in the bisulfite ion treated gene sequence of the test cell with a similarly treated corresponding non-methylated gene sequence. A decrease in the amount or distribution of uracil residues in the gene from the test cell indicates methylation of cytosine residues in CpG dinucleotides in the gene of the test cell. The amount or distribution of uracil residues also can be detected by contacting the bisulfite ion treated target gene sequence, following exposure to alkaline conditions, with an oligonucleotide that selectively hybridizes to a nucleotide sequence of the target gene that either contains uracil residues or that lacks uracil residues, but not both, and detecting selective hybridization (or the absence thereof) of the oligonucleotide.

[0070] Test compounds can be tested for their potential to treat cancer. Cancer cells for testing can be selected from the group consisting of prostate, lung, breast, and colon cancer. Expression of a gene selected from those listed in Table 1 is determined and if it is increased by the compound in the cell or if methylation of the gene is decreased by the compound in the cell, one can identify it as having potential as a treatment for cancer.

[0071] Alternatively such tests can be used to determine an esophageal, head and neck, gastric, small intestinal, pancreas, liver cancer patient's response to a chemotherapeutic agent. The patient can be treated with a chemotherapeutic agent. If expression of a gene selected from those listed in Table 1 is increased by the compound in cancer cells or if methylation of the gene is decreased by the compound in cancer cells it can be selected as useful for treatment of the patient.

[0072] The above disclosure generally describes the present invention. All references disclosed herein are expressly incorporated by reference. A more complete understanding can be obtained by reference to the following specific examples which are provided herein for purposes of illustration only, and are not intended to limit the scope of the invention.

### EXAMPLES

### Example 1—Materials and Methods

### Sample Collection and Nucleic Acids Extraction

[0073] Sixty eight colon tumour samples, 37 adenomas and 31 carcinomas, were collected directly after polypectomy or surgery, respectively, evaluated by the pathologist and a tissue sample of these specimens was frozen in liquid nitrogen.

[0074] Isolation of RNA and DNA was done with Trizol solution (Invitrogen life technologies), following the supplier instructions. Two 4 μm thick, frozen sections before and after obrtainint the tissue sample for RNA and DNA isolation, respectively, were cut and stained with haematoxylin-eosin in order to estimate the percentage of tumour cells present in the tissue sample. Only samples with at least 70% tumor cells were selected for RNA and DNA isolation.

### Microarray Slide Preparation

[0075] Oligonucleotide arrays containing 18,861 60mer oligonucleotide sequences representing 18,664 unique human genes, designed by Compugen (San Jose, Calif., USA) and obtained from Sigma-Genosys (Zwijndrecht, The Netherlands) were used for microarray expression analysis. The arrays were prepared at the VUmc Microarray facility (on the world-wide web at the domain .vumc.nl at the page microarrays). In short, oligonucleotides were spotted at a concentration of 10 μM, in 150 mM sodium phosphate (pH 8.5), on CodeLink slides (Amersham BioSciences, Roosendaal, The Netherlands), using a SpotArray Enterprise (Perkin Elmer Life Sciences, Zaventem, Belgium), and processed according to the manufacturer's protocol.

cDNA Synthesis, Probe Preparation and Hybridisation

[0076] cDNA was prepared from 15 μg of total sample RNA and 15 μg of Universal Human Reference RNA (Stratagene, La Jolla, Calif., USA) using oligo-dT₂₀-VN primer (Invitrogen, Breda, The Netherlands), Superscript II Reverse Transcriptase (Invitrogen) and an amino-allyl dNTP stock solution, containing 20 mM dATP, 20 mM dCTP, 20 mM, dGTP, 4 mM dTTP (all from Invitrogen) and 16 mM amino-allyl-dUTP (Ambion, Cambridgeshire, UK). cDNA was purified using microcon YM-30 filter columns (Millipore B. V., Amsterdam, The Netherlands), completely dried in a vacuum centrifuge and dissolved in 9 μl of 50 mM NaHCO₃/Na₂CO₃ (pH 9.0). Next, cDNA was left to couple to Cy3 (sample) or Cy5 (reference) dyes (Fluorolink Cy3/Cy5 Monofunctional dye pack (Amersham Biosciences)) at room temperature for one hour, after which uncoupled dyes were blocked by adding 4 M hydroxylamine. Cy3 (sample) and Cy5 (reference) labeled cDNA was mixed and the probe was purified using the Qiaquick PCR purification kit (Qiagen Benelux B. V., Venlo, The Netherlands). Twelve μg poly A (Pharmacia, Capelle a/d IJssel, The Netherlands), 60 μg yeast tRNA (Sigma) and 24 μg Cot-1 DNA (Invitrogen) was added after which the probe was precipitated, dissolved in 127 μl hybridisation mix (0.2% SDS, 8% glycerol, 50% formamide and 0.1% dextrane sulphate in 2×SSC), denaturated at 70° C. for 10 minutes and incubated at 37° C. for one hour. Slides were pre-hybridised for 45 minutes at 37° C. with a pre-hybridisation solution containing 30 μg salmon sperm DNA (Gibco, Breda, The Netherlands), 12 μg poly A (Pharmacia), 60 μg yeast tRNA (Sigma) and 24 μg Cot-1 DNA (Invitrogen) dissolved in 127 μl hybridisation mix. Pre-hybridisation was followed by probe hybridisation for 14 hours at 37° C. Both pre-hybridisation and hybridisation were performed in HybStation 12 (Perkin Elmer Life Sciences).

### Data Analysis

### Image Acquisition and Quantification

[0077] Arrays were scanned using ScanArray Express (Perkin Elmer Life Sciences) and quantified in ImaGene 5.6.1 software (BioDiscovery Ltd, Marina del Rey, Calif., USA) using default settings for the flagging of bad quality spots. Flagged spots were excluded from further analysis.

### Array Analysis

[0078] We analyzed 68 chips containing 30000 genes each. Thirty-seven slides were analyzed using RNA from adenomas and 31 used carcinoma DNA. A GAL file supplied by the VUMC microarray group (galfile=“H30K 25042004 b34.gal”) was used to correlate spot position and gene name. We used the R based Bioconductor packages (marray) to normalize/analyze the expression data.

[0079] We normalized using a median based procedure across arrays (“maNorm”-routine from the “marray” package). The universal standard is always labeled RED [R]. The ratio M is defined as 2 log(R/G)(A=2 log(R*G)/2).

[0080] We calculated the statistical difference between Adenomas and Carcinomas using the Wilcoxon test on the M ratios. In addition to Wilcoxon we also applied the “Thas” test which is able to detect differential behaviour in (sub)populations.

[0081] Progression marker definition: (Median Carcinoma Ratios M)−(Median Adenoma Ratios M)>0 AND Wilcoxon p-value <0.00001. This value of 0.00001 is corrected for multiple hypothesis testing.

[0082] Early marker definition: (Median Carcinoma Ratios M+Medium Adenoma Ratios M), sort descending (the higher the score the lower the expression), arbitrary cut-off of 4

[0083] The promoters of the genes passing the progression or early detection marker definition have to be located on the genome-wide alignment less than five ancestral nodes from an established list of 56 markers (see BROAD promoter analysis) OR have to contain more than or equal to 4 different motifs (see DEEP promoter analysis)

### BROAD Analysis: Genome-Wide Promoter Alignment

[0084] We extracted 8793 sequences from the Database of Transcription Start Sites (DBTSS, version 3.0 based on human assembly build 31). Subsequently, Newcpgreport was used to detect CpG island in a 500 bp region for each gene. A CpG island is defined as a region of minimal 200 bp, a GC content larger than 50% and an Observed/Expected (O/E) ratio larger than 0.60. The 500 bp are located from −300 to +200 relative to the TSS. We complemented this set with 56 reported/known cancer-specifically methylated genes. This resulted in a sequence set of 4738 genes which are subsequently aligned by clustalw. A software tool called Treeillustrator was used to visualize the large guide tree in addition to indicating the location of the known markers.

### DEEP Analysis: Specific Binding Patterns

[0085] The DEEP part of the computational promoter analysis focuses on identifying discriminating sequences feature between two different functional classes (A & B) of CpG island containing promoters. Class A lists genes which are only methylated in cancer and not in normals, while Class B enumerates genes which are at least partially methylated in normals. For each of these genes we extracted a symmetric region of 1 kb around the predicted transcription start site (TSS). Again newcpgreport was used and a CpG island is defined as a region of minimal 200 bp, a GC content larger than 50% and a 0/E ratio larger than 0.60. Seven motifs were found to be overrepresented in Class A versus Class B and were used to predict informative cancer specific methylation.

### Example 2

### Material and Methods

[0086] Samples arrive as PEFF or fresh frozen material and are subdivided in 3 classes: C=Cancer (region indicated by the pathologist); N=Normal (non cancer material from patient, histologically normal resection end); NN=Normal normal (autopsie material from ‘healty’ patients).

[0087] gDNA is extracted by the classic phenol/chloroform extraction method and measured on the Nanodrop spectrophotometer (Isogen). 1-1.5 μg gDNA is BT treated with the EZ-96 DNA Methylation Kit™ (ZymoResearch) and eluted in 50 μl. Integrity test is done on the BT-treated samples with primers to check the length of the DNA fragments. Integrity test primers are shown in FIG. 1 and SEQ ID NO: 794-803. Quality Control is acceptable if we find back amplicons up to 300 bps.

[0088] All samples are run on the LightCycler (see LightCycler protocol) with a bACT STD curve and an bACT beacon MB6 (mCGACTGCGTGTGGGGTGGTGATGGAG-GAGGTTTAGGCAGTCGv; SEQ ID NO: 804), bACT copy number is determined. Samples with a copy number <200 are discarded, samples are normalized to the same copy number.

[0089] The following sense (S), antisense (A), and Beacon (B) probes were used for FUK, PDCD4, and PHACTR3:

| SYBRGreen primers | | | | |
|---|---|---|---|---|
| FUK_11670 | S | ATTATATTTTTCGGAGTGTATC | A | TAACGTACCTACCGTCGCCC (SEQ ID NO: |
| | | GC (SEQ ID NO: 805) | | 806) |
| PDCD4_11827 | S | GTTCGTAGTTCGGGGCGTT | A | GCGATCCTATCAAATCCGAA (SEQ ID NO: |
| | | (SEQ ID NO: 807) | | 808) |
| PHACTR3_11706 | S | TAGGGAGCGTTAGGTTCGG(SEQ | A | CGCTATAAAACGACGAACGA (SEQ ID |
| | | ID NO: 809) | | NO: 810) |

| Beacons | | |
|---|---|---|
| MB_FUK_11670_1a | | CGACATGCCGCGTTAAAGAGTTC |
| | | GTTTCGTCGAGCGCATGTCG |
| | | (SEQ ID NO: 811) |
| MB_FUK_11670_1b | | CGACAGCCGCGTTAAAGAGTT |
| | | CGTTTCGTCGAGCGCTGTCG |
| | | (SEQ ID NO: 812) |
| PDCD4_11827 | B | CGACATGCCCGCAAATCCAAC |
| | | CGCGCCCTGCATGTCG (SEQ |
| | | ID NO: 813) |
| PHACTR3_11706 | B | CGACATGCCCGAACCCATAAC |
| | | CGCGTCGAAGCATGTCG (SEQ |
| | | ID NO: 814) |

[0090] Methylation specific real-time PCR is performed on either BioTrove (high throughput) or LC480 (Roche) in 384 format.

[0091] Sample UIDs are loaded into OMSpark™ software which randomizes the samples position according to sample type (C, N, NN). We always try to load the same number (n) of cancer and normal samples

### BioTrove OpenArray™ Transcript Analysis System (BioTrove, Inc. 12 Gill Street Suite 4000 Woburn, Mass. 01801-1728)

[0092] Each BioTrove array consist out of 48 subarrays each containing 64 through-holes. Per subarray 8 through-holes are used as negative control, 56 are spotted with primers at a concentration of 250 nM. Each subarray is loaded with a mix of LC Faststart DNA SYBR Green I Master Mix (Roche), SYBR Green I (Sigma) end dilution 1:1, 6, Glycerol end concentration 0.5%, Pluronic F-68 (Gibco) end concentration 0.2%, BSA end concentration 1 mg/ml, Roche MgC12 end concentration 1 mM, Formamide end concentration 8% and 50 ng BT-treated gDNA (calculated on the start concentration before BT-treatment). PCR specifications: 90° C.-10″, (43° C.-18″, 49° C.-60″, 77° C.-22″, 72° C.-70″, 95° C.-28″, 40 cycles), 70° C.-200″, 45° C.-5″, melting curve 45° C.>94° C. (according to fixed BioTrove plate file)

### Analysis

### 1. PCR-O-Matic

[0093] Results are exported as csv file and imported in the PCR-O-Matic analyzing software which uses following algorithm to determine if there is a valuable amplification product formed.

[0094] Analyzing selected holes with Parameters from Light Cutoff (1000) (ID=29)

[0095] Min cycles until plateau=40, Min intensity difference=1000

[0096] Min dy/dx of intensity temp: 200

[0097] Min dy/dx of melting temperature: 200

[0098] 1=amplification=Methylated

[0099] 0=no amplification=Unmethylated

[0100] Because not all through holes are always filled we use the ROX (included in mastermix) signal to check the loading of the through holes. If the ROX signal is below a given value the results are marked as −1 by the software and discarded in the analysis to avoid false negatives. For each assay we calculate specificity and sensitivity as follows:

[0101] Sensitivity=Sum of methylated cancer samples/total count of cancer samples.

[0102] Specificity=1−(Sum methylated normal samples/total count of normal samples)

[0103] Assays are ranked on specificity and sensitivity and the highest ranked assays are checked on the LC480 on a selection of “n” cancer and “n” normal patient samples.

### 2. Analysis Based on Melting Peaks—Ct Values.

[0104] A second more refined analysis is performed based on melting peaks which enables us to differentiate between primer dimers and real amplification products, furthermore based on Ct values to be able to differentiate between methylated amplification products and background amplification from unmethylated material.

[0105] Minimal delta Ct=5 ct's (assay dependent).

[0106] Again specificity and sensitivity are calculated and assays are ranked according to specificity and sensitivity. The highest ranked assays are used to develop building blocks.

### LightCycler LC480 (Roche)

[0107] In a 384 format we use 10 μl PCR reaction mix per well which consists of LightCycler 480 SYBR Green I Master Mix, Roche MgCl₂ end concentration 1 mM, BSA end concentration 1 mg/ml, Primer F end concentration 125 nM, Primer R end concentration 125 nM, and gDNA sample 10 ng/10 μl.

### Cycling Profile Sybrgreen

| | | aquisition | | | |
|---|---|---|---|---|---|
| | target temp | mode | hold | cycles | ramp rate |
| activation | 95 | none | 0:10:00 | 1 | 4.8 |
| amplification | 95 | | 0:00:10 | | 4.8 |
| | 60 | | 0:00:30 | | 2.5 |
| | 72 | | 0:00:01 | 45 | 4.8 |
| Melting curve | 95 | | 0:00:05 | | 4.8 |
| | 45 | | 0:01:00 | | 4.8 |
| | 95 | continous | | 1 | 2.5 |
| Cool down | 40 | | | 1 | 2 |

### Cycling Profile Beacons

| | target | | | | |
|---|---|---|---|---|---|
| | temp | aquisition mode | hold | cycles | ramp rate |
| activation | 95 | none | 0:05:00 | 1 | 4.8 |
| amplification | 95 | | 0:00:30 | 45 | 4.8 |
| | 57 | aquisition mode | 0:00:30 | | 2.5 |
| | 72 | | 0:00:30 | | 4.8 |
| Melting curve | 95 | | 0:00:05 | 1 | 4.8 |
| | 45 | | 0:01:00 | | 2.5 |
| | 95 | continous | | | |

[0110] On the LightCycler we use the second analysis method based on melting peaks and Ct values.

### Results

[0111] For the investigation of the progression markers we used a BioTrove colon array which contains amongst others FUK_{—}11670, PHACTR3_{—}11706, and PDCD411827 assays.

[0112] We ran 37 cancer samples (Adenoma/Carcinoma), 11 normal samples and 27 normal normal samples on BioTrove and 40 cancer (Carcinoma) and 40 normal samples on LightCycler. The results obtained are summarized below. All three markers (FUK_{—}11670, PHACTR3_{—}11706, and PDCD4_{—}11827) were differentially methylated compared to the normal samples.

| BioTrove | | | | | |
|---|---|---|---|---|---|
| | | Sen- | LightCycler | | |
| | Spec- | si- | | Spec- | Sensi- |
| Assay | ificity | tivity | Assay | ificity | tivity |
| FUK_11670 | 84 | 58 | FUK_11670 | 92 | 50 |
| PHACTR3_11706 | 82 | 39 | PHACTR3_11706 | 87 | 56 |
| PDCD4_11827 | 92 | 53 | | | |

[0113] Methylation of the three markers was further investigated in 16 adenoma and 16 carcinoma samples. The results are listed below. Methylation of all three markers could be demonstrated in both adenoma's and carcinoma's. The three markers showed the same Ct average value for adenoma compared to carcinoma. These results indicate that all three markers are suitable for early detection of cancer. Our results indicated that PHACTR3 was the first marker out of the three markers to appear in adenoma samples.

| 16 Adenomas/16 | Average Ct value | | |
|---|---|---|---|
| Carcinomas samples | FUK_11670 | PDCD4 | PHACTR3 |
| average carcinoma's | 41.8 | 39.2 | 36.0 |
| average adenoma's | 41.6 | 38.5 | 34.5 |

TABLE 1
NM_145059; Hs.7907; Homo sapiens L Homo sapiens fucokinase (FUK)
NM_183244; NM_080672; Hs.288513; Homo sapiens Q9H4T4 like (H17739), mRNA.
Homo sapiens phosphatase and actin regulator 3 (PHACTR3), transcript variant 2
NM_145341; Hs.326248; Homo sapiens programmed cell death 4 (neoplastic transformation inhibitor) (PDCD4), transcript variant 2, mRNA.
NM_004669; Hs.64746; Homo sapiens chloride intracellular channel 3 (CLIC3), mRNA.
NM_000958; Hs.199248; Homo sapiens prostaglandin E receptor 4 (subtype EP4) (PTGER4), mRNA.
NM_032827; Hs.135569; Homo sapiens hypothetical protein FLJ14708 (FLJ14708), mRNA.
NM_006030; Hs.127436; Homo sapiens calcium channel, voltage-dependent, alpha 2/delta subunit 2 (CACNA2D2), mRNA.
NM_016569; Hs.267182; Homo sapiens T-box 3 (ulnar mammary syndrome) (TBX3), transcript variant 2, mRNA.
NM_001546; Hs.34853; Homo sapiens inhibitor of DNA binding 4, dominant negative helix-loop-helix protein (ID4), mRNA.
NM_001249; Hs.80975; Homo sapiens ectonucleoside triphosphate diphosphohydrolase 5 (ENTPD5), mRNA.
NM_014310; Hs.248222; Homo sapiens RASD family, member 2 (RASD2), mRNA.
NM_002731; Hs.87773; Homo sapiens protein kinase, cAMP-dependent, catalytic, beta (PRKACB), mRNA.
NM_005905; Hs.123119; Homo sapiens MAD, mothers against decapentaplegic homolog 9 (Drosophila) (MADH9), mRNA.
NM_012413; Hs.79033; Homo sapiens glutaminyl-peptide cyclotransferase (glutaminyl cyclase) (QPCT), mRNA.
NM_013943; Hs.25035; Homo sapiens chloride intracellular channel 4 (CLIC4), mRNA.
NM_002167; Hs.76884; Homo sapiens inhibitor of DNA binding 3, dominant negative helix-loop-helix protein (ID3), mRNA.
NM_021911; Hs.103998; Homo sapiens gamma-aminobutyric acid (GABA) A receptor, beta 2 (GABRB2), transcript variant 1, mRNA.
NM_003882; Hs.194680; Homo sapiens WNT1 inducible signaling pathway protein 1 (WISP1), transcript variant 1, mRNA.
BC029775; Hs.112554; Homo sapiens, hypothetical gene LOC127421, clone MGC: 35394 IMAGE: 5186268, mRNA, complete cds.
BC008502; Hs.342655; Homo sapiens, clone MGC: 14841 IMAGE: 4295121, mRNA, complete cds.
AB037842; Hs.117268; Homo sapiens mRNA for KIAA1421 protein, partial cds.
NM_003279; Hs.182421; Homo sapiens troponin C2, fast (TNNC2), mRNA.
BC035027; Hs.173048; Homo sapiens, clone IMAGE: 4828469, mRNA.
NM_025087; Hs.288462; Homo sapiens hypothetical protein FLJ21511 (FLJ21511), mRNA.
NM_005904; Hs.100602; Homo sapiens MAD, mothers against decapentaplegic homolog 7 (Drosophila) (MADH7), mRNA.
NM_016308; Hs.11463; Homo sapiens UMP-CMP kinase (UMP-CMPK), mRNA.
BF683837; Hs.94499; 602140129F1 NIH_MGC_46 Homo sapiens cDNA clone IMAGE: 4301287 5′, mRNA sequence.
NM_001343; Hs.81988; Homo sapiens disabled homolog 2, mitogen-responsive phosphoprotein (Drosophila) (DAB2), mRNA.
NM_005375; Hs.1334; Homo sapiens v-myb myeloblastosis viral oncogene homolog (avian) (MYB), mRNA.
NM_138409; Hs.20953; Homo sapiens hypothetical protein BC010003 (LOC112609), mRNA.
NM_133367; Hs.239388; Homo sapiens chromosome 6 open reading frame 33 (C6orf33), mRNA.
NM_012326; Hs.172740; Homo sapiens microtubule-associated protein, RP/EB family, member 3 (MAPRE3), mRNA.
NM_014353; Hs.3797; Homo sapiens RAB26, member RAS oncogene family (RAB26), mRNA.
NM_024513; Hs.257267; Homo sapiens FYVE and coiled-coil domain containing 1 (FYCO1), mRNA.
NM_005476; Hs.5920; Homo sapiens UDP-N-acetylglucosamine-2-epimerase/N-acetylmannosamine kinase (GNE), mRNA.
NM_172127; —; Homo sapiens calcium/calmodulin-dependent protein kinase (CaM kinase) II delta (CAMK2D), transcript variant 1, mRNA.
AK091130; Hs.351270; Homo sapiens cDNA FLJ33811 fis, clone CTONG2002095.
NM_014729; Hs.184297; Homo sapiens thymus high mobility group box protein TOX (TOX), mRNA.
NM_004453; Hs.323468; Homo sapiens electron-transferring-flavoprotein dehydrogenase (ETFDH), nuclear gene encoding mitochondrial
protein, mRNA.
NM_000196; Hs.1376; Homo sapiens hydroxysteroid (11-beta) dehydrogenase 2 (HSD11B2), mRNA.
NM_018690; Hs.200333; Homo sapiens apolipoprotein B48 receptor (APOB48R), mRNA.
NM_005144; Hs.272367; Homo sapiens hairless (HR), transcript variant 1, mRNA.
NM_018662; Hs.26985; Homo sapiens disrupted in schizophrenia 1 (DISC1), mRNA.
NM_002398; Hs.170177; Homo sapiens Meis1, myeloid ecotropic viral integration site 1 homolog (mouse) (MEIS1), mRNA.
NM_004915; Hs.10237; Homo sapiens ATP-binding cassette, sub-family G (WHITE), member 1 (ABCG1), transcript variant 1, mRNA.
NM_001752; Hs.395771; Homo sapiens catalase (CAT), mRNA.
NM_019000; Hs.82273; Homo sapiens hypothetical protein FLJ20152 (FLJ20152), mRNA.
NM_016353; Hs.5943; Homo sapiens zinc finger, DHHC domain containing 2 (ZDHHC2), mRNA.
NM_003645; Hs.11729; Homo sapiens solute carrier family 27 (fatty acid transporter), member 2 (SLC27A2), mRNA.
NM_023028; Hs.278581; Homo sapiens fibroblast growth factor receptor 2 (bacteria-expressed kinase, keratinocyte growth factor receptor,
craniofacial dysostosis 1 transcript variant 10, m
NM_017682; Hs.190222; Homo sapiens vitelliform macular dystrophy 2-like protein 1 (VMD2L1), mRNA.
NM_016400; Hs.300954; Homo sapiens Huntingtin interacting protein K (HYPK), mRNA.
NM_016357; Hs.10706; Homo sapiens epithelial protein lost in neoplasm beta (EPLIN), mRNA.
NM_152621; Hs.353519; Homo sapiens hypothetical protein MGC26963 (MGC26963), mRNA.
NM_017699; Hs.114556; Homo sapiens hypothetical protein FLJ20174 (FLJ20174), mRNA.
NM_138764; Hs.159428; Homo sapiens BCL2-associated X protein (BAX), transcript variant epsilon, mRNA.
NM_007283; Hs.6721; Homo sapiens monoglyceride lipase (MGLL), mRNA.
NM_006416; Hs.82921; Homo sapiens solute carrier family 35 (CMP-sialic acid transporter), member 1 (SLC35A1), mRNA.
NM_003839; Hs.114676; Homo sapiens tumor necrosis factor receptor superfamily, member 11a, activator of NFKB (TNFRSF11A), mRNA.
NM_000439; Hs.78977; Homo sapiens proprotein convertase subtilisin/kexin type 1 (PCSK1), mRNA.
NM_014899; Hs.10432; Homo sapiens Rho-related BTB domain containing 3 (RHOBTB3), mRNA.
NM_001405; Hs.158306; Homo sapiens ephrin-A2 (EFNA2), mRNA.
NM_000901; Hs.1790; Homo sapiens nuclear receptor subfamily 3, group C, member 2 (NR3C2), mRNA.
NM_003359; Hs.28309; Homo sapiens UDP-glucose dehydrogenase (UGDH), mRNA.
NM_030919; Hs.70704; Homo sapiens chromosome 20 open reading frame 129 (C20orf129), mRNA.
BC002877; Hs.154145; Homo sapiens, Similar to hypothetical protein FLJ11585, clone MGC: 11258 IMAGE: 3942160, mRNA, complete cds.
NM_018453; Hs.433269; Homo sapiens chromosome 14 open reading frame 11 (C14orf11), mRNA.
NM_025137; Hs.288872; Homo sapiens hypothetical protein FLJ21439 (FLJ21439), mRNA.
NM_004315; Hs.75811; Homo sapiens N-acylsphingosine amidohydrolase (acid ceramidase) 1 (ASAH1), mRNA.
NM_016341; Hs.6733; Homo sapiens phospholipase C, epsilon 1 (PLCE1), mRNA.
NM_018259; Hs.17283; Homo sapiens hypothetical protein FLJ10890 (FLJ10890), mRNA.
NM_000177; Hs.290070; Homo sapiens gelsolin (amyloidosis, Finnish type) (GSN), mRNA.
NM_005570; Hs.287912; Homo sapiens lectin, mannose-binding, 1 (LMAN1), mRNA.
AK075564; Hs.27373; Homo sapiens cDNA PSEC0264 fis, clone NT2RP3002337.
NM_000633; Hs.79241; Homo sapiens B-cell CLL/lymphoma 2 (BCL2), nuclear gene encoding mitochondrial protein, transcript variant alpha, mRNA.
NM_052904; Hs.45056; Homo sapiens KIAA1900 protein (KIAA1900), mRNA.
NM_032848; Hs.250820; Homo sapiens hypothetical protein FLJ14827 (FLJ14827), mRNA.
NM_005172; Hs.247685; Homo sapiens atonal homolog 1 (Drosophila) (ATOH1), mRNA.
NM_016014; Hs.380389; Homo sapiens CGI-67 protein (CGI-67), mRNA.
NM_152369; Hs.234101; Homo sapiens hypothetical protein MGC45474 (MGC45474), mRNA.
BC011002; Hs.372775; Homo sapiens, clone IMAGE: 3946502, mRNA, partial cds.
NM_016614; Hs.46847; Homo sapiens TRAF and TNF receptor-associated protein (TTRAP), mRNA.
BC041626; —; Homo sapiens, clone MGC: 52394 IMAGE: 4554923, mRNA, complete cds.
NM_005154; Hs.152818; Homo sapiens ubiquitin specific protease 8 (USP8), mRNA.
NM_002840; Hs.75216; Homo sapiens protein tyrosine phosphatase, receptor type, F (PTPRF), transcript variant 1, mRNA.
NM_024312; Hs.7041; Homo sapiens MGC4170 protein (MGC4170), mRNA.
NM_005263; Hs.73172; Homo sapiens growth factor independent 1 (GFI1), mRNA.
NM_018473; Hs.9676; Homo sapiens uncharacterized hypothalamus protein HT012 (HT012), mRNA.
NM_001829; Hs.174139; Homo sapiens chloride channel 3 (CLCN3), mRNA.
NM_138340; Hs.13377; Homo sapiens abhydrolase domain containing 3 (ABHD3), mRNA.
NM_030574; Hs.172803; Homo sapiens START domain containing 5 (STARD5), mRNA.
NM_030790; Hs.23047; Homo sapiens T-cell immunomodulatory protein (CDA08), mRNA.
AB033070; Hs.194408; Homo sapiens mRNA for KIAA1244 protein, partial cds.
NM_138818; Hs.352153; Homo sapiens hypothetical protein BC019095 (LOC158471), mRNA.
NM_005585; Hs.153863; Homo sapiens MAD, mothers against decapentaplegic homolog 6 (Drosophila) (MADH6), mRNA.
NM_004872; Hs.11441; Homo sapiens chromosome 1 open reading frame 8 (C1orf8), mRNA.
BC041376; —; Homo sapiens, Similar to hypothetical protein 5830442F04, clone MGC: 43895 IMAGE: 5274634, mRNA, complete cds.
BC035149; Hs.247309; Homo sapiens, clone IMAGE: 5264837, mRNA.
NM_020831; Hs.31146; Homo sapiens megakaryoblastic leukemia (translocation) 1 (MKL1), mRNA.
NM_032387; Hs.105448; Homo sapiens protein kinase, lysine deficient 4 (PRKWNK4), mRNA.
NM_001609; Hs.81934; Homo sapiens acyl-Coenzyme A dehydrogenase, short/branched chain (ACADSB), nuclear gene encoding mitochondrial
protein, mRNA.
AB033025; Hs.50081; Homo sapiens mRNA for KIAA1199 protein, partial cds.
NM_152332; Hs.57787; Homo sapiens chromosome 14 open reading frame 47 (C14orf47), mRNA.
NM_000773; Hs.75183; Homo sapiens cytochrome P450, subfamily IIE (ethanol-inducible), polypeptide 1 (CYP2E1), mRNA.
NM_153498; Hs.279788; Homo sapiens CamKI-like protein kinase (CKLiK), transcript variant 2, mRNA.
NM_014047; Hs.420065; Homo sapiens HSPC023 protein (HSPC023), mRNA.
NM_022486; Hs.28564; Homo sapiens hypothetical protein DKFZp761E1824 (DKFZP761E1824), mRNA.
NM_006493; Hs.30213; Homo sapiens ceroid-lipofuscinosis, neuronal 5 (CLN5), mRNA.
NM_025163; Hs.289077; Homo sapiens hypothetical protein FLJ12768 (FLJ12768), mRNA.
NM_138448; Hs.422682; Homo sapiens acylphosphatase 2, muscle type (ACYP2), mRNA.
AB019210; Hs.26612; Homo sapiens BM32A mRNA for PMMLP, complete cds.
AF353674; Hs.7367; Homo sapiens BTB domain protein (BDPL) mRNA, partial cds.
NM_002979; Hs.75760; Homo sapiens sterol carrier protein 2 (SCP2), mRNA.
NM_005630; Hs.83974; Homo sapiens solute carrier family 21 (prostaglandin transporter), member 2 (SLC21A2), mRNA.
NM_004438; Hs.73964; Homo sapiens EphA4 (EPHA4), mRNA.
NM_000015; Hs.2; Homo sapiens N-acetyltransferase 2 (arylamine N-acetyltransferase) (NAT2), mRNA.
NM_003205; Hs.21704; Homo sapiens transcription factor 12 (HTF4, helix-loop-helix transcription factors 4) (TCF12), mRNA.
AL122070; —; Homo sapiens mRNA; cDNA DKFZp434E0535 (from clone DKFZp434E0535); partial cds.
NM_018281; Hs.34579; Homo sapiens hypothetical protein FLJ10948 (FLJ10948), mRNA.
NM_020403; Hs.12450; Homo sapiens protocadherin 9 (PCDH9), mRNA.
NM_002257; Hs.123107; Homo sapiens kallikrein 1, renal/pancreas/salivary (KLK1), mRNA.
NM_015141; Hs.82432; Homo sapiens KIAA0089 protein (KIAA0089), mRNA.
NM_018211; Hs.49933; Homo sapiens hypothetical protein FLJ10770 (KIAA1579), mRNA.
NM_152320; Hs.23492; Homo sapiens hypothetical protein FLJ31295 (FLJ31295), mRNA.
NM_031472; Hs.326586; Homo sapiens hypothetical protein MGC11134 (MGC11134), mRNA.
NM_005618; Hs.389889; Homo sapiens delta-like 1 (Drosophila) (DLL1), mRNA.
NM_012190; Hs.9520; Homo sapiens formyltetrahydrofolate dehydrogenase (FTHFD), transcript variant 1, mRNA.
NM_016651; Hs.48950; Homo sapiens heptacellular carcinoma novel gene 3 (DAPPER1), mRNA.
NM_006796; Hs.29385; Homo sapiens AFG3 ATPase family gene 3-like 2 (yeast) (AFG3L2), nuclear gene encoding mitochondrial protein, mRNA.
NM_000983; Hs.326249; Homo sapiens ribosomal protein L22 (RPL22), mRNA.
NM_017423; Hs.246315; Homo sapiens UDP-N-acetyl-alpha-D-galactosamine:polypeptide N-acetylgalactosaminyltransferase 7 (GalNAc-T7)
(GALNT7), mRNA.
NM_003808; Hs.54673; Homo sapiens tumor necrosis factor (ligand) superfamily, member 13 (TNFSF13), transcript variant alpha, mRNA.
NM_004496; Hs.70604; Homo sapiens forkhead box A1 (FOXA1), mRNA.
NM_153446; Hs.374679; Homo sapiens beta 1,4 N-acetylgalactosaminyltransferase (B4GALT), mRNA.
NM_025212; Hs.118569; Homo sapiens Dvl-binding protein IDAX (inhibition of the Dvl and Axin complex) (IDAX), mRNA.
NM_005173; Hs.5541; Homo sapiens ATPase, Ca++ transporting, ubiquitous (ATP2A3), mRNA.
NM_005637; Hs.153221; Homo sapiens synovial sarcoma translocation, chromosome 18 (SS18), mRNA.
NM_020233; Hs.47668; Homo sapiens x 006 protein (MDS006), mRNA.
NM_006278; Hs.75268; Homo sapiens sialyltransferase 4C (beta-galactoside alpha-2,3-sialytransferase) (SIAT4C), mRNA.
NM_000293; Hs.78060; Homo sapiens phosphorylase kinase, beta (PHKB), mRNA.
NM_006197; Hs.75737; Homo sapiens pericentriolar material 1 (PCM1), mRNA.
NM_015111; AB002339; Hs.101761; Human mRNA for KIAA0341 gene, partial cds.
NM_001145; Hs.332764; Homo sapiens angiogenin, ribonuclease, RNase A family, 5 (ANG), mRNA.
NM_005080; Hs.149923; Homo sapiens X-box binding protein 1 (XBP1), mRNA.
NM_030912; Hs.54580; Homo sapiens tripartite motif-containing 8 (TRIM8), mRNA.
NM_025244; Hs.116116; Homo sapiens testis specific, 10 (TSGA10), mRNA.
NM_002165; Hs.75424; Homo sapiens inhibitor of DNA binding 1, dominant negative helix-loop-helix protein (ID1), mRNA.
NM_002828; Hs.82829; Homo sapiens protein tyrosine phosphatase, non-receptor type 2 (PTPN2), transcript variant 1, mRNA.
NM_013230; Hs.375108; Homo sapiens CD24 antigen (small cell lung carcinoma cluster 4 antigen) (CD24), mRNA.
NM_017707; Hs.44579; Homo sapiens up-regulated in liver cancer 1 (UPLC1), mRNA.
NM_138811; Hs.122055; Homo sapiens hypothetical protein BC015397 (LOC136895), mRNA.
NM_000690; Hs.195432; Homo sapiens aldehyde dehydrogenase 2 family (mitochondrial) (ALDH2), nuclear gene encoding mitochondrial
protein, mRNA.
NM_006839; Hs.78504; Homo sapiens inner membrane protein, mitochondrial (mitofilin) (IMMT), mRNA.
NM_032270; Hs.193669; Homo sapiens hypothetical protein AD158 (AD158), mRNA.
NM_032857; Hs.374554; Homo sapiens lactamase, beta (LACTB), transcript variant 1, nuclear gene encoding mitochondrial protein, mRNA.
NM_005606; Hs.18069; Homo sapiens legumain (LGMN), mRNA.
NM_000520; Hs.119403; Homo sapiens hexosaminidase A (alpha polypeptide) (HEXA), mRNA.
NM_019012; Hs.86149; Homo sapiens phosphoinositol 3-phosphate-binding protein-2 (PEPP2), mRNA.
NM_145160; Hs.250870; Homo sapiens mitogen-activated protein kinase kinase 5 (MAP2K5), transcript variant A, mRNA.
AK092094; Hs.166575; Homo sapiens cDNA FLJ34775 fis, clone NT2NE2003315.
NM_004634; Hs.1004; Homo sapiens bromodomain and PHD finger containing, 1 (BRPF1), mRNA.
NM_025181; Hs.108812; Homo sapiens hypothetical protein FLJ22004 (FLJ22004), mRNA.
NM_018421; Hs.135917; Homo sapiens TBC1 domain family, member 2 (TBC1D2), mRNA.
NM_139058; Hs.157208; Homo sapiens aristaless related homeobox (ARX), mRNA.
NM_018147; Hs.173438; Homo sapiens Fas apoptotic inhibitory molecule (FAIM), mRNA.
NM_013443; Hs.109672; Homo sapiens CMP-NeuAC:(beta)-N-acetylgalactosaminide (alpha)2,6-sialyltransferase member VI (ST6GALNAC6), mRNA.
NM_015392; Hs.105547; Homo sapiens neural proliferation, differentiation and control, 1 (NPDC1), mRNA.
BC022357; Hs.82202; Homo sapiens, clone MGC: 23866 IMAGE: 4297017, mRNA, complete cds.
BC030557; Hs.159066; Homo sapiens, clone MGC: 40430 IMAGE: 5218944, mRNA, complete cds.
NM_022154; Hs.284205; Homo sapiens BCG-induced gene in monocytes, clone 103 (BIGM103), mRNA.
NM_080672; Hs.288513; Homo sapiens Q9H4T4 like (H17739), mRNA.
NM_014142; Hs.301957; Homo sapiens nudix (nucleoside diphosphate linked moiety X)-type motif 5 (NUDT5), mRNA.
NM_021005; Hs.347991; Homo sapiens nuclear receptor subfamily 2, group F, member 2 (NR2F2), mRNA.
BC040548; —; Homo sapiens, Similar to hypothetical protein MGC38960, clone IMAGE: 5288206, mRNA.
NM_001749; Hs.74451; Homo sapiens calpain, small subunit 1 (CAPNS1), mRNA.
BC034757; Hs.115274; Homo sapiens, Indian hedgehog homolog (Drosophila), clone MGC: 34815 IMAGE: 5182642, mRNA, complete cds.
NM_006834; Hs.32217; Homo sapiens RAB32, member RAS oncogene family (RAB32), mRNA.
NM_033342; Hs.343661; Homo sapiens tripartite motif-containing 7 (TRIM7), mRNA.
NM_014172; Hs.297214; Homo sapiens phosphohistidine phosphatase (PHP14), mRNA.
BC019669; Hs.181165; Homo sapiens, eukaryotic translation elongation factor 1 alpha 1, clone MGC: 25051 IMAGE: 4478650, mRNA, complete cds.
NM_006377; Hs.155001; Homo sapiens unc-13-like (C. elegans) (UNC13), mRNA.
NM_017768; Hs.50848; Homo sapiens hypothetical protein FLJ20331 (FLJ20331), mRNA.
NM_015079; Hs.126084; Homo sapiens KIAA1055 protein (KIAA1055), mRNA.
NM_005340; Hs.256697; Homo sapiens histidine triad nucleotide binding protein 1 (HINT1), mRNA.
NM_022827; Hs.103147; Homo sapiens hypothetical protein FLJ21347 (FLJ21347), mRNA.
NM_052968; Hs.283923; Homo sapiens apolipoprotein A-V (APOA5), mRNA.
NM_033028; —; Homo sapiens Bardet-Biedl syndrome 4 (BBS4), mRNA.
NM_005923; Hs.151988; Homo sapiens mitogen-activated protein kinase kinase kinase 5 (MAP3K5), mRNA.
NM_001874; Hs.334873; Homo sapiens carboxypeptidase M (CPM), mRNA.
NM_152487; Hs.84522; Homo sapiens hypothetical protein FLJ31842 (FLJ31842), mRNA.
NM_004787; Hs.29802; Homo sapiens slit homolog 2 (Drosophila) (SLIT2), mRNA.
NM_153225; Hs.41185; Homo sapiens hypothetical protein FLJ40021 (FLJ40021), mRNA.
NM_004799; Hs.194716; Homo sapiens MAD, mothers against decapentaplegic homolog (Drosophila) interacting protein, receptor activation anchor
(MADHIP), trans [symbol]
NM_003383; Hs.73729; Homo sapiens very low density lipoprotein receptor (VLDLR), mRNA.
NM_000698; Hs.89499; Homo sapiens arachidonate 5-lipoxygenase (ALOX5), mRNA.
BC040191; Hs.192775; Homo sapiens, Similar to expressed sequence AI414849, clone IMAGE: 4814106, mRNA.
NM_018043; Hs.26176; Homo sapiens hypothetical protein FLJ10261 (FLJ10261), mRNA.
NM_000112; Hs.29981; Homo sapiens solute carrier family 26 (sulfate transporter), member 2 (SLC26A2), mRNA.
NM_005309; Hs.103502; Homo sapiens glutamic-pyruvate transaminase (alanine aminotransferase) (GPT), mRNA.
NM_004748; Hs.283753; Homo sapiens cell cycle progression 8 protein (CPR8), mRNA.
AB067471; Hs.345063; Homo sapiens mRNA for KIAA1884 protein, partial cds.
NM_004056; Hs.250502; Homo sapiens carbonic anhydrase VIII (CA8), mRNA.
NM_002760; Hs.56336; Homo sapiens protein kinase, Y-linked (PRKY), mRNA.
NM_006361; Hs.66731; Homo sapiens homeo box B13 (HOXB13), mRNA.
NM_015270; Hs.12373; Homo sapiens adenylate cyclase 6 (ADCY6), transcript variant 1, mRNA.
NM_001177; Hs.242894; Homo sapiens ADP-ribosylation factor-like 1 (ARL1), mRNA.
NM_013390; Hs.160417; Homo sapiens transmembrane protein 2 (TMEM2), mRNA.
NM_152429; Hs.37716; Homo sapiens hypothetical protein MGC39320 (MGC39320), mRNA.
NM_018668; Hs.26510; Homo sapiens vacuolar protein sorting 33B (yeast) (VPS33B), mRNA.
NM_016013; Hs.106529; Homo sapiens CGI-65 protein (CIA30), mRNA.
NM_003159; Hs.50905; Homo sapiens cyclin-dependent kinase-like 5 (CDKL5), mRNA.
NM_004232; Hs.44439; Homo sapiens suppressor of cytokine signaling 4 (SOCS4), mRNA.
BC035372; Hs.11067; Homo sapiens, clone MGC: 35266 IMAGE: 5174235, mRNA, complete cds.
NM_004869; Hs.126550; Homo sapiens vacuolar protein sorting 4B (yeast) (VPS4B), mRNA.
NM_000627; Hs.241257; Homo sapiens latent transforming growth factor beta binding protein 1 (LTBP1), mRNA.
NM_024081; Hs.306226; Homo sapiens transmembrane gamma-carboxyglutamic acid protein 4 (TMG4), mRNA.
NM_012421; Hs.13321; Homo sapiens rearranged L-myc fusion sequence (RLF), mRNA.
NM_004819; Hs.107019; Homo sapiens symplekin; Huntingtin interacting protein I (SPK), mRNA.
AF091236; Hs.384498; Homo sapiens ADP/ATP translocase mRNA, partial cds.
NM_031304; Hs.91103; Homo sapiens hypothetical protein MGC4293 (MGC4293), mRNA.
NM_017590; Hs.25347; Homo sapiens ubiquitous tetratricopeptide containing protein RoXaN (RoXaN), mRNA.
NM_033338; NM_033339; Hs.9216; Homo sapiens caspase 7, apoptosis-related cysteine protease (CASP7), transcript variant gamma, mRNA.
NM_018144; NM_018145; Hs.8055; Homo sapiens hypothetical protein FLJ10579 (FLJ10579), mRNA.
The sequences of each of the genes is incorporated by reference herein as they existed in the public database on the date of filing of the subject application. [symbol]
indicates data missing or illegible when filed

We claim:

1. A method for identifying colorectal cancer or predisposition to colorectal cancer, comprising:
detecting in a test sample containing colorectal cells or nucleic acids from colorectal cells, epigenetic silencing of at least one gene listed in Table 1;
identifying the test sample as neoplastic or predisposed to neoplasia or from cells that are neoplastic or predisposed to neoplasia.

2. The method of claim 1 wherein the test sample contains adenoma cells.

3. The method of claim 1 wherein the test sample contains carcinoma cells.

4. The method of claim 3 wherein the at least one gene is selected from the group consisting of NM_{—}145059.1, NM_{—}183244.1, NM_{—}145341.2, NM_{—}080672.3, NM_{—}002630, NM_{—}003383, NM_{—}005504, NM_{—}016269, NM_{—}006988, NM_{—}021637, NM_{—}001888, and NM_{—}014899; and wherein the test sample is identified as containing neoplastic cells or nucleic acids from neoplastic cells.

5. The method of claim 2 wherein the test sample contains adenoma cells and wherein the at least one gene is selected from the group consisting of NM_{—}145341, NM_{—}001752, NM_{—}014142, NM_{—}001145, NM_{—}016013, NM_{—}017590, NM_{—}152429, NM_{—}138340, NM_{—}052968, NM_{—}183244, NM_{—}199423, NM_{—}015111, NM_{—}002181, NM_{—}005637, NM_{—}030790, NM_{—}018144, NM_{—}004232, NM_{—}030912, NM_{—}145059, NM_{—}033338, NM_{—}006834, NM_{—}003014, NM_{—}001343, NM_{—}000963, NM_{—}004385, and NM_{—}002899; and wherein the test sample is identified as containing cells which are likely to progress to carcinoma or as containing nucleic acids from said cells.

6. The method of claim 1 wherein the test sample is from a biopsy specimen.

7. The method of claim 1 wherein the test sample is from a surgical specimen.

8. The method of claim 1 wherein the test sample is from a cytological specimen.

9. The method of claim 1 wherein the test sample is isolated from stool, blood, or urine.

10. The method of claim 5 wherein surgical removal of neoplastic tissue is recommended to the patient.

11. The method of claim 5 wherein adjuvant chemotherapy is recommended to the patient.

12. The method of claim 5 wherein adjuvant radiation therapy is recommended to the patient.

13. The method of claim 5 wherein a colonoscopy is recommended to the patient.

14. The method of claim 5 wherein increased frequency of colonoscopy is recommended to the patient.

15. The method of claim 5 wherein an imaging study of the colon is recommended to the patient.

16. The method of claim 1 wherein epigenetic silencing of at least two genes is detected.

17. The method of claim 1 wherein epigenetic silencing of at least three genes is detected.

18. The method of claim 1 wherein epigenetic silencing is detected by detecting methylation of a CpG dinucleotide motif in the gene.

19. The method of claim 1 wherein epigenetic silencing is detected by detecting methylation of a CpG dinucleotide motif in a promoter of the gene.

20. The method of claim 1 wherein epigenetic silencing is detected by detecting diminished expression of mRNA of the gene.

21. The method of claim 1 wherein epigenetic silencing is detected by detecting diminished expression of protein encoded by the gene.

22. The method of claim 18 wherein methylation is detected by contacting at least a portion of the gene with a methylation-sensitive restriction endonuclease, said endonuclease preferentially cleaving methylated recognition sites relative to non-methylated recognition sites, whereby cleavage of the portion of the gene indicates methylation of the portion of the gene.

23. The method of claim 22 wherein the methylation-sensitive restriction endonuclease is selected from the group consisting of Acc III, Ban I, BstN I, Msp I, and Xma I.

24. The method of claim 18 wherein methylation is detected by contacting at least a portion of the gene with a methylation-sensitive restriction endonuclease, said endonuclease preferentially cleaving non-methylated recognition sites relative to methylated recognition sites, whereby cleavage of the portion of the gene indicates non-methylation of the portion of the gene provided that the gene comprises a recognition site for the methylation-sensitive restriction endonuclease.

25. The method of claim 24 wherein the methylation-sensitive restriction endonuclease is selected from the group consisting of Ace II, Ava I, BssH H, BstU I, Hpa II, and Not I.

26. The method of claim 18 wherein methylation is detected by:
contacting at least a portion of the gene of the test cell with a chemical reagent that selectively modifies a non-methylated cytosine residue relative to a methylated cytosine residue, or selectively modifies a methylated cytosine residue relative to a non-methylated cytosine residue; and
detecting a product generated due to said contacting.

27. The method of claim 26 wherein the step of detecting comprises amplification with at least one primer that hybridizes to a sequence comprising a modified non-methylated CpG dinucleotide motif but not to a sequence comprising an unmodified methylated CpG dinucleotide motif thereby forming amplification products.

28. The method of claim 26 wherein the step of detecting comprises amplification with at least one primer that hybridizes to a sequence comprising an unmodified methylated CpG dinucleotide motif but not to a sequence comprising a modified non-methylated CpG dinucleotide motif thereby forming amplification products.

29. The method of claim 27 wherein the amplification products are detected using (a) a first oligonucleotide probe which hybridizes to a sequence comprising a modified non-methylated CpG dinucleotide motif but not to a sequence comprising an unmodified methylated. CpG dinucleotide motif, (b) a second oligonucleotide probe that hybridizes to a sequence comprising an unmodified methylated CpG dinucleotide motif but not to sequence comprising a modified non-methylated CpG dinucleotide motif, or (c) both said first and second oligonucleotide probes.

30. The method of claim 28 wherein the amplification products are detected using (a) a first oligonucleotide probe which hybridizes to a sequence comprising a modified non-methylated CpG dinucleotide motif but not to a sequence comprising an unmodified methylated CpG dinucleotide motif, (b) a second oligonucleotide probe that hybridizes to a sequence comprising an unmodified methylated CpG dinucleotide motif but not to sequence comprising a modified non-methylated CpG dinucleotide motif, or (c) both said first and second oligonucleotide probes.

31. The method of claim 26 wherein the product is detected by a method selected from the group consisting of electrophoresis, chromatography, and mass spectrometry.

32. The method of claim 26 wherein the chemical reagent is hydrazine.

33. The method of claim 32 further comprising cleavage of the hydrazine-contacted at least a portion of the gene with piperidine.

34. The method of claim 26 wherein the chemical reagent comprises bisulfite ions.

35. The method of claim 34 further comprising treating the bisulfite ion-contacted at least a portion of the gene with alkali.

36. The method of claim 18 wherein methylation is detected by:
amplifying at least a portion of the gene, said portion comprising a CpG dinucleotide motif, to form amplification products;
contacting the amplification products with a chemical reagent that selectively modifies a non-methylated cytosine residue relative to a methylated cytosine residue, or selectively modifies a methylated cytosine residue relative to a non-methylated cytosine residue; and
detecting a product generated due to said contacting using (a) a first oligonucleotide probe which hybridizes to a sequence comprising a modified non-methylated CpG dinucleotide motif but not to a sequence comprising an unmodified methylated CpG dinucleotide motif, (b) a second oligonucleotide probe that hybridizes to a sequence comprising an unmodified methylated CpG dinucleotide motif but not to sequence comprising a modified non-methylated CpG dinucleotide motif, or (c) both said first and second oligonucleotide probes.

37. A method of reducing or inhibiting neoplastic growth of a cell which exhibits epigenetic silenced transcription of at least one gene associated with a cancer, the method comprising:
determining that a cell has an epigenetic silenced gene selected from the group consisting of NM_{—}145059.1, NM_{—}183244.1, NM_{—}145341.2, NM_{—}080672.3, NM_{—}002630, NM_{—}003383, NM_{—}005504, NM_{—}016269, NM_{—}006988, NM_{—}021637, NM_{—}001888, NM_{—}014899, NM_{—}145341, NM_{—}001752, NM_{—}014142, NM_{—}001145, NM_{—}016013, NM_{—}017590, NM_{—}52429, NM_{—}138340, NM_{—}052968, NM_{—}183244, NM_{—}199423, NM_{—}015111, NM_{—}002181, NM_{—}005637, NM_{—}030790, NM_{—}018144, NM_{—}004232, NM_{—}030912, NM_{—}145059, NM_{—}033338, NM_{—}006834, NM_{—}003014, NM_{—}001343, NM_{—}000963, NM_{—}004385, and NM_{—}002899;
restoring expression of a polypeptide encoded by the epigenetic silenced gene in the cell by contacting the cell with a CpG dinucleotide demethylating agent, thereby reducing or inhibiting unregulated growth of the cell.

38. The method of claim 37 wherein the contacting is performed in vitro.

39. The method of claim 37 wherein the contacting is performed in vivo by administering the agent to a mammalian subject comprising the cell.

40. The method of claim 37 wherein the demethylating agent is selected from the group consisting of 5-aza-2′-deoxycytidine, 5-aza-cytidine, Zebularine, procaine, and L-ethionine.

41. A method of reducing or inhibiting neoplastic growth of a cell which exhibits epigenetic silenced transcription of at least one gene associated with a cancer, the method comprising:
determining that a cell has an epigenetic silenced gene selected from the group consisting of NM_{—}145059.1, NM_{—}183244.1, NM_{—}145341.2, NM_{—}080672.3, NM_{—}002630, NM_{—}003383, NM_{—}005504, NM_{—}016269, NM_{—}006988, NM_{—}021637, NM_{—}001888, NM_{—}014899, NM_{—}145341, NM_{—}001752, NM_{—}014142, NM_{—}001145, NM_{—}016013, NM_{—}017590, NM_{—}52429, NM_{—}38340, NM_{—}052968, NM_{—}183244, NM_{—}199423, NM_{—}015111, NM_{—}002181, NM_{—}005637, NM_{—}030790, NM_{—}018144, NM_{—}004232, NM_{—}030912, NM_{—}145059, NM_{—}033338, NM_{—}006834, NM_{—}003014, NM_{—}001343, NM_{—}000963, NM_{—}004385, and NM_{—}002899;
introducing a polynucleotide encoding a polypeptide into the cell, wherein the polypeptide is encoded by said gene, wherein the polypeptide is expressed in the cell thereby restoring expression of the polypeptide in the cell.

42. A method of treating a cancer patient, the method comprising:
determining that a cancer cell in the patient has an epigenetic silenced gene selected from the group consisting of NM_{—}145059.1, NM_{—}183244.1, NM_{—}145341.2, NM_{—}080672.3, NM_{—}002630, NM_{—}003383, NM_{—}005504, NM_{—}016269, NM_{—}006988, NM_{—}021637, NM_{—}001888, NM_{—}014899, NM_{—}145341, NM_{—}001752, NM_{—}014142, NM_{—}001145, NM_{—}016013, NM_{—}017590, NM_{—}152429, NM_{—}138340, NM_{—}052968, NM_{—}183244, NM_{—}199423, NM_{—}015111, NM_{—}002181, NM_{—}005637, NM_{—}030790, NM_{—}018144, NM_{—}004232, NM_{—}030912, NM_{—}145059, NM_{—}033338, NM_{—}006834, NM_{—}003014, NM_{—}001343, NM_{—}000963, NM_{—}004385, and NM_{—}002899;
administering a demethylating agent to the patient in sufficient amounts to restore expression of the epigenetic silenced gene in the patient's cancer cells.

43. The method of claim 42 wherein the demethylating agent is selected from the group consisting of 5-aza-2′-deoxycytidine, 5-aza-cytidine, Zebularine, procaine, and L-ethionine.

44. A method of treating a cancer patient, the method comprising:
determining that a cancer cell in the patient has an epigenetic silenced gene selected from the group consisting of NM_{—}145059.1, NM_{—}183244.1, NM_{—}145341.2, NM_{—}080672.3, NM_{—}002630, NM_{—}003383, NM_{—}005504, NM_{—}016269, NM_{—}006988, NM_{—}021637, NM_{—}001888, NM_{—}014899, NM_{—}145341, NM_{—}001752, NM_{—}014142, NM_{—}001145, NM_{—}016013, NM_{—}017590, NM_{—}52429, NM_{—}138340, NM_{—}052968, NM_{—}183244, NM_{—}99423, NM_{—}015111, NM_{—}002181, NM_{—}005637, NM_{—}030790, NM_{—}018144, NM_{—}004232, NM_{—}030912, NM_{—}145059, NM_{—}033338, NM_{—}006834, NM_{—}003014, NM_{—}001343, NM_{—}000963, NM_{—}004385, and NM_{—}002899;
administering to the patient a polynucleotide encoding a polypeptide, wherein the polypeptide is encoded by the epigenetic silenced gene, wherein the polypeptide is expressed in the patient's tumor thereby restoring expression of the polypeptide in the cancer.

45. A method for selecting a therapeutic strategy for treating a cancer patient, comprising:
identifying a gene whose expression in cancer cells of the patient is reactivated by a demethylating agent, wherein the gene is selected from the group consisting of NM_{—}145059.1, NM_{—}183244.1, NM_{—}145341.2, NM_{—}080672.3, NM_{—}002630, NM_{—}003383, NM_{—}005504, NM_{—}016269, NM_{—}006988, NM_{—}021637, NM_{—}001888, NM_{—}014899, NM_{—}145341, NM_{—}001752, NM_{—}014142, NM_{—}001145, NM_{—}016013, NM_{—}017590, NM_{—}152429, NM_{—}138340, NM_{—}052968, NM_{—}183244, NM_{—}99423, NM_{—}015111, NM_{—}002181, NM_{—}005637, NM_{—}030790, NM_{—}018144, NM_{—}004232, NM_{—}030912, NM_{—}145059, NM_{—}033338, NM_{—}006834, NM_{—}003014, NM_{—}001343, NM_{—}000963, NM_{—}004385, and NM_{—}002899; and
selecting a therapeutic agent which increases expression of the gene for treating said cancer patient.

46. The method of claim 45 further comprising the step of prescribing the therapeutic agent for said cancer patient.

47. The method of claim 45 further comprising the step of administering the therapeutic agent to said cancer patient.

48. The method of claim 45 wherein the therapeutic agent comprises a polynucleotide encoding the gene.

49. The method of claim 45 wherein the demethylating agent is 5-aza-2′-deoxycytidine.

50. The method of claim 45 wherein the therapeutic agent is 5-aza-2′-deoxycytidine.

51. The method of claim 45 wherein the cancer cells are obtained from a surgical specimen.

52. The method of claim 45 wherein the cancer cells are obtained from a biopsy specimen.

53. The method of claim 45 wherein the cancer cells are obtained from a cytological sample.

54. The method of claim 45 wherein the cancer cells are obtained from stool, blood, or urine.

55. A kit for assessing methylation in a test sample, comprising in a package:
a reagent that (a) modifies methylated cytosine residues but not non-methylated cytosine residues, or that (b); modifies non-methylated cytosine residues but not methylated cytosine residues; and
a pair of oligonucleotide primers that specifically hybridizes under amplification conditions to a region of a gene selected from the group consisting of NM_{—}145059.1, NM_{—}183244.1, NM_{—}145341.2, NM_{—}080672.3, NM_{—}002630, NM_{—}003383, NM_{—}005504, NM_{—}016269, NM_{—}006988, NM_{—}021637, NM_{—}001888, NM_{—}014899, NM_{—}145341, NM_{—}001752, NM_{—}014142, NM_{—}001145, NM_{—}016013, NM_{—}017590, NM_{—}152429, NM_{—}138340, NM_{—}052968, NM_{—}183244, NM_{—}199423, NM_{—}015111, NM_{—}002181, NM_{—}005637, NM_{—}030790, NM_{—}018144, NM_{—}004232, NM_{—}030912, NM_{—}145059, NM_{—}033338, NM_{—}006834, NM_{—}003014, NM_{—}001343, NM_{—}000963, NM_{—}004385, and NM_{—}002899, wherein the region is within about 1 kb of said gene's transcription start site.

56. The kit of claim 55 wherein at least one of said pair of oligonucleotide primers hybridizes to a sequence comprising a modified non-methylated CpG dinucleotide motif but not to a sequence comprising an unmodified methylated CpG dinucleotide motif or wherein at least one of said pair of oligonucleotide primers hybridizes to a sequence comprising an unmodified methylated CpG dinucleotide motif but not to sequence comprising a modified non-methylated CpG dinucleotide motif.

57. The kit of claim 55 further comprising (a) a first oligonucleotide probe which hybridizes to a sequence comprising a modified non-methylated CpG dinucleotide motif but not to a sequence comprising an unmodified methylated CpG dinucleotide motif, (b) a second oligonucleotide probe that hybridizes to a sequence comprising an unmodified methylated CpG dinucleotide motif but not to sequence comprising a modified non-methylated CpG dinucleotide motif, or (c) both said first and second oligonucleotide probes.

58. The kit of claim 56 further comprising (a) a first oligonucleotide probe which hybridizes to a sequence comprising a modified non-methylated CpG dinucleotide motif but not to a sequence comprising an unmodified methylated CpG dinucleotide motif, (b) a second oligonucleotide probe that hybridizes to a sequence comprising an unmodified methylated CpG dinucleotide motif but not to sequence comprising a modified non-methylated CpG dinucleotide motif, or (c) both said first and second oligonucleotide probes.

59. The kit of claim 55 further comprising an oligonucleotide probe.

60. The kit of claim 55 further comprising a DNA polymerase for amplifying DNA.

The application's sequence listing, which the Patent Office published only in electronic form, follows.

SEQUENCE LISTING (814 sequences)

SEQ ID NO: 1 - DNA, 6000 bp, Homo sapiens
agagaggggatttcaccatgttagccaggatggtctcgatctcctgacctcgtgatccgcccgccttggcatccccaagtgctgggattacaggtgtgagccactgcacagggcctttttttttttttttttaaatgggctaggcatgatggtttgtgccagctacttgggagactaagatgggaggatcacttgaacccaggatcaaggctgcagtgaaccatgattgcgccactgtactccaacctggaatacagagtaagaccctgactcaaaaagcaatacataaataaaagaaagaaagcaaaaagaaaaccaaatgccatgtggaatcctagaccagatcctggaccagaaagagggcaggaatggggaaacgggggaaatttaaataaggcctacagaatacttaatagcattatatcagggttcatgaatgtatttggttaacagaaaaaaaaagtaatctatcagggttaatttcctgggtttggtaattatattatggttatttacataagatgttgacattggggatgttggatggaaagtatgtgggaactctctgtactatgtttataactttaagtctagaattttgtcaaaataaaaattaaaaagcataaatttttgaacttgagaaaaacaaacctcaggtccaatatgtccccaataggttcagttgaactaatggtataagtataaaagacacatacaacatttaagggaaaaaactataaaaccaaggcaatagctgaaattgtacctaaaaatttatgtagacagccgccaaagacttaaggtttttagatcacttgtctcctgagctaaggtaacaaactcaggggttagaatatacagggaaaactcagatacgaggcccaatctcacaccctctgcaagagaccccactaccagtattcctcaaaaggtggtcctttgacctctgcttgagtgactctgagaatggagggctcactattgtactcctttgggtgatttttagcttgtaagcccaagtgctattgatagcagtgagaaattggaaataacccaaatgaatagagccaggtaatcttagctaccaagatgatagagcactgcgtggccactgaaagtgacaaaaatgtggcctatcttaatgcacagaaatgtgtatatgcagtaatccaaagtgacaagggcaaaacagaagttgcctttacacaacgatcacagctatgttcaaatctcagtgtgcacaataagagctggaagataatttagaaggccacaaatagttgtaattttgagttgccttgattttttacaaagtgatctatgtatagaattttaaatgaaatttagtaggcagaattttatttatttatttatttatttatttttgagactgagtctcactctgttgcccaagctggtgtgcagtggcatgatctcggctcactgcaacctctgcctcctgcgggctcaagtgattctcgtgcctcagtctcccgagtagctgggattgtaggtgcccaccgccatgcctggataatttttgtatttttaatagagacagggtttcaccatattggccaggctggtctcaaactcctgaactcaaatgatccgcccgccttggcctcccaaagccctgggattacaggcatgagccaccatgcccagcctagtatgcagaattaaaaaaaaaaatcctccattaagggacttggagattgtcatgtcaagattcattgagcatgtcttcatggaacattagctagggaaggattctaaggccatgtctgagccctgtgggaaagtgacatgattgattagtgatgtctgccaatgatgatgaatgagcagtggtagtgtgcatgctatgtagttgccacctcttccaaagacattcccattcctattgtcattttgtcatttttgtagatcttctgaaagatgagtttgtgataccgaaggtaccatgtgcaggaagaaacctctttcagttaaaagctataggattttgggcaagtcactgggatataagatggtatgaaataaatacctgaagggaacaaaagcaaaattctccacaataacagtcagtttgagaataggtgggctcaacagagaagactttgtggcattcgtgctgggtcttgaaggatgaggagattttacaggtgactatgctcgggaagggtatttcacatggagggcatagcatggataaaggcatggaggtgaggaaataagaggcctcctggggagaaaggaaagtgtaggttagttgtagaagatgattttggaaacgtaggaaatggagaatgtcctgaatgccaagataacaagtttgagttttatttagttagcagtgggcttctgatgagttttgatgcaagtgatgcttaaaggaaatgagactagaaggcgataagaaaaagcctgggcaccaccaccatgaggggacctgaggacccagaatttgacaaaatctcctgggggtgtaggctagcaatcagagccctgggataacggggtgtgggagctataactaagccccagcaagacaatctcctgagctctatctattgttcagagatttcctgagctctgagccaggcacagggatgcaaaagccatgggctctgctctctgggagcttctagtcatgtgggttttttcagatatggggggcagcagacagggcagaccacaggcaggagaggacttgggatctgaccgagctgtcagaagatcaattgagtaggcaggggctgtaggccccagggtctggcagccaagctgggatgccctagcttgatgcagtcgatcagggactctcggaagggatttgttgtgacttcttgggtgtttgcggaaggttagcctggcagcagccagactcctggagtcctaccagataagaaaagggtccctgaagcttttgttggggaatctggaggcctcacatgacttaggggatcccatgaattctgctatattaaaggatttggcaagattccaatgacctgggccaggcgcgtggctcatgcctgtaatcccaacactttgggaggctgaggctggcggataacgaggtcaagagattgagaccatcctggccaatatggtgaaaacctgtctctactacaaatataagaaaattagctgggcgtggtggcacgcacctgtagttccagctacttgcgaggctgaggcaggagaattgcttgaacccgggaggtggaggttgcattgagtcaagatcgcgccactgcactccagcctggtgacacagcaagactccatctcaaaaaaaaaaaaaagattccaatgatcctataattttatttacctgcttcccaaatatggggactcccctcaacccagggaaggcactccctatcttgtctttcacctcatagtccaatgtacctctggggaccacagggaggaatggaagctaagttggcttgagacaccatcaggtagggacctccctctctgtgccaggcccagctgacttctagtcctccctcccctcccccattataaggcttggggaagctccagggctctggctgggcagtgggtagcagtggctagagtggaaaatcccccaccagctggatgatatcagtgtttacagatctggtcctggccttctgcctggggcctgaggacctgacaaatctgcctggagccctgagtgtggggtacgaggtcgcagagaggctattggcacggggatttttttcccactcactccaaaatggagagctgtcctgggccaggtgagcaggcactgggccagctccaggtcacctcaggcaatgggaagctggtagctgggaagtggggtgggagttgggggaggtgggggagggggtgccgagatgagggatagaggaactaacaaatcagacttgggggctgcacaagggcttgggagtgggtcatgggagacataggcactttaggagaactgaagacagaagcagggacgcagcggggcagaagagagaacgaggaacagcagcagggcgcaggcctgtccctcttcatatgcccctgctccaggcctctgatctaggtcggtacaagaggcacaaccagaagctggtgtggcttactctgtgagtgtgtcctgagcatttgctgaattatgacaagcatttctccaaatgtcctgtttgaccttgaaagcctctgaagctgctcaaatagctgtgacttcagccattgtcatcccagccccaccaccagcaccagaactcccgacactgccatcagcaccaccctcaccatcaccatcattgtaaccagcatcctagctactagctactgacctcttgaccccctgacacccctatctcctcccctgagggtttgagggtgctaggagttaggagtggagtcaaagcttcaagtacataacctagagacaagcagttctcaatgattttgcccatccagaagacacttagcagtgcctggagatatatttggttggcacaatgggtggactgctcctggcatcgagtcggtagatgccaggaatgctgttaaacattctatagtacacaggatggggcccacaacaaagaactatttgttccaaaatgtcgacagcactgaggttgcgaaaccctggctatagatcctatctatcccagcactctgcctctacctttttctggccctcgtccctaaatgcacacattatgcctctggtttgggaacaagacgtaatcttcaccactccatcttacggcaactttctctcttatcgcttgcacctcctggcctccgatgcttgaaccaaaaagtcaataagatgaaagtctgttgcggccaccctcaagaaggaaaaatacacagaaacgatacacgaagcacagggtacaccctgggttgaggtcatggctgcccagggcagggaggcagcgattagactaatcttgggcgtataaaagaggaaagagtgcccaggtcttcactccactgcgactgcagaactcagagctgctcttcctctgtggccagttggggaccagcatcatgaagtggatggtggtggtcttggtctgcctccagctcttggaggcagcagtggtcaagtgagtctgggatctggctgctggtgcagggagcctggatgggagcctaaagccctgcaaagggcaactgggccaggggacaccctgcctgtctctactctgggacttctgctaggggaagggaagtctccctttgctgatgttagacaggacacatgggtggaaggagacacagcccctgccttcaggaaacttcctatcaaagggaaaagcacgatcccttcccccatctgatgaggaaagatggacctgaaacagaggtggtaagggtgactactgcccaagcagcccttgaatggcaggtgtggattcttctcacagaagggagcaatcctttttggataagggatatcttatccactatcctctctaaaagttgctttaaggctgaaaatttactggcagatgccaaaatcatctaagcagaaacaccagtaaatgtaaatctctacacctgaggggtcaggagaaaactctggagtagatggcatggctcacaggccatcaggaaggcgcccagcctgccatcctgcctgttatttctctacccaagagtacttcctgaggccaagagctggctcctctcagaaactcctatcaatatgcatatttggtagaggtggttaattagtcttcatagctcagggtgaaggggtttagcagagaatttctggagaatgcagagtccccagggaatggggattaagcagaattctggagcctagagcaaggccagagtggacccctagagactcccaagcaatggcagcaagcaagtctgggaaggagagtgccgagggtgtgactgagcccataggatgggacagaaacggtgatttataagttccaactccagagctgatctgtgctccagaccacccaggccaacttc

SEQ ID NO: 2 - DNA, 6000 bp, Homo sapiens
gtcataggttgactggctgaggcccttaaaccaattacagtagctaaggggggaagtgatgtcaatgggttcagaacagtggttctcaaagtatgctccctgaccagtggcattaacatcatctgggaacttactaaaaatgcaaattcttgggcctactgatccagaaactctggaggtggggcccagcaatctatgttttaacaagccttccaagtgattctgatggaagctaaaatgcatgacccactgattttgaccatcaggtcctactcatggagcctagaaggggggaatcccactcatttccctgggctgtcacacaattagaaaataatggaatggaggcctgtgaagttaccatcgaaacacttcagaaggggatggccccagaagaggacagctcatttcacatcttactttctatgctgaggctgtggggtagaaatcacagtgatgagtactacaaattagcaaattggtttgaagattatttcagatgccaatattatcagtctaaggatcttgaagaaaaataatgataagcatcaaccttagcattttctatgggtcctaacctactcccttaggagaaatttgacaaattaatttacacaaatatgacagaagtaaacctacttagcaattaaacggcactgaagaagtcattctctaaaacagtttcttaatcatgactaatcctaagaatcaactagaatagggttacatatacagattcctgggttctaccctagaccaattgaatcaggatcatcaacggaggggcctgagaatctgtacttttagcagacatagccagtgatacacagggattatatatgtttggaaaatgcttcaaggagataaagccaaaaaaatcaaggagaaaaatctcatggaggaattatttgaatgcttctgactaatcaaacggtagtttcttccccttatttttattattattttttttgagacacggctccctgaatcacccaggcagcagtacaatggcatgatcacagctcactgcagcctcaccctccaggcctcaagcaattctcttgcctcaggcccccctccacccccagtagctgagtctataggtgcgcaccaccacgtccagctagttttttgtattttttgtggggttttgccatgatgcccaggctggtcttgaactcctgagctcaggtgatctgcctgcctcggcctctcaaagtgttggtattacaggtgtgagctaccacacccagcctcctctactttcttcaatgcactccctcactactggggcctctaactaatgtttcttcctctagtctgaccctatcccacaccctaaacaagttgctttccataccattgtcacagtaaaagaaactggatgtcaggcctctgatcaaaatctatcacaagtccttactatggttcacaggataaaatccaaagccttagcatgacatcctagactccagctaatccagtccttgcctttcttcttcagccttacttcacattgttagtccatttgaaccccacccttgaatcaccctgaatcccttccattgccttgaatagatactgctgttttgcctttgtgccctctgctcaccatggttttccttccctcttcccctggtgtatcagtcaggttaacactaggttatgctgaggtaacaaaatctcagtagatgaagatgacaaagatttactactctctcacccgttctatgttaggggttggcaagtttgtttgatttttttttttttctaaaggactagatggtaaatattttaggctttgggagcaacatacagtctctgttgcacactattcctcttctttgtaaaactctttttaaatgtaaagatcactcttatttgtaggccatacaaaagcaggtgactggctagacttggcccatgagccctagtttgctaacctctactctatgtgaccagtgctaaagacacatagacagcagggaactactcacatgggtagttctaaatgaatcgaatcactcggagacctgggctaatgcagcagccacctcttaaacatttcttgtcaccacgcagacacaaagagagggtttcacataagcaattaagtgctccggtctgaaagtggcaccctgtaacttaggctcacaaataattagccaaagttagtctttcgaccccatccaaccataagggggccaggacgtccaatcctaccatgtgtccagaagtagggagaattcagatcaccgggtaaaaattatgaaaaaagctcagagacaaacgctctgtgaagccttttctgataccttcatcctgcagccagaatagctgcttcttccttgcaatcttctagcactttaagcatctcttaatcagagtgctatacatagggtactacagttgcccacttgcctgcctcccctaccagatgctgagcttcctagataagcacttctgtatgcccactactttgcacagtgcccgttagccagggatgctcactatgtgttgcttcaacaaataaatgaatgtggtggattgtaggagtgaatgggattgcctctgcatttacctgacggcgtcgggaatccagcagtgtcaacttctctgaacccagttagttcaaccatttcagtctccacttatgatcaattagctctgttagttcaaccacttcaatatccacttatcatcaatttatctttttagttattagctactttctatcataatccaatgaatttctccatacaacctttttcttctaataaacaacaccttgcagagagctggtccttgaggccacggagcactttgatataatgtggcttggctttcttttcagtttacaggccaaaaggcagacacagagaggcacagtgatttttcccaagttacacagtcaatcagagatggagccaaaagttatgctttcttttgagtcaacaaaaaagctacaggattgaatacagagctgcagctaagttcactgaaagtttatttatatcccttggagaattagaaagtactcacacacgtttttcaaagttaagtcttattataccatatcaatgtatagcttgtagtatacctgtatctctgagtaaagtattaaaaacaagtcatatgactgtttattaatgctgcctctttttgtattgattccacccatcccttctactcctttcctcttctgtaaagcagtagctcatcagatggcatttcagaaccctgagaatatgaaagacatcatgcactaaggttttcctatcacatctcaatgccattaggtgaataacaccggcatgcatcttcactactaaatgtcatacaaacaaatttcagttgtttcacatgcaacctgtgtggctgctgcagtttgtatcaactatgtaaccacagggtgggcaaaatagcattcaaaatgagctatagtgcaagataccatccatacgtagagttaagccctttcatgcttagcagtcacaatcaggatatctttggcccacagaaacctatcctgactggaattttcctctcctgtgtgtctcctggatatagtaagttcctaataaacatctcctctgattgctagccttgacaaatttccaggagaaccagggcaaggagaagacagtgaggcagtgcccgctgctcttcagatcaccaacagaatagagtcagaatatgatattattgaaaccttccaagtttgaattaagataaaaacaactttttcaaaataccaaaaaccttttatttaagaaagtgaaatcgctcgatgtgccctcccactctggttagatgctcaacagaccacagcagacaatgcacctcaaccagggctaagtgtgcaagaaaactgaagtacacaaaaagcaaattatagactcaggtactgtcaggcacaaaagaagaaccaaccctttctaggagtcttgtctttgcttcctttattctttcctcgattcttgtaattgaatgttacaaagtatatcaagaggaataaacgtatggggcccctctcttccaaacaagaaaaggttaagcttttaattacaggccctcaaactatcattttgtgcaattagcaattaactataatcgttgatgagcaaatgcaaagctgcgctagcaatttcccttctcctcatcccaggctgggttatttcagtcttgttctattacagaggaccagccacaaccgcgcgcactctctttcaaacatacacactctctcacttaaagacacatttagttttcggcaaaacggcatctcagcgtgcgattgagaccggcatcccaaaccccacttttgagcagcccaaacgtttggagcccctccgcttcatcactttctgagtggatagaggaggcccgaagaagatgctacctaccagcctctctcaggggcgcaggagagggtggtagagagatgcttgttgcccctggaaactgcaagtaccccccaggtgcacgccccgtcagtggggaggcggtggcaacagcaacgatagttgcatcagcgctaactgctgctgctgctgcgtgttctgccggaggctgccgggagggtacagtaatgactgtagggagcgcacagccgctgcggcggcaggttccctggatcaggaaattaggacaggcacccgggattggaggcgagggcggcgcgcgagccaaccagcggtcgccccgggcccccgtgagccccaggcgaacgcgcggagcagccgggcccctagagcggtccgggtggcggcggcggcagccacgaccacgaccgcggtcactcacgcacgctcacactcgcacgctccccgcgcgggcacccggctgcccggcgcgtgcaagaggagcgcgtcgagggaaaggagggccgaagccgccgcgctcccgcccgcccgccgcgcctcccgttgaccacgccccctccggccccctccccgctgctcaccccgctctccggccgccgccggtgcgggtgctccgctaccggctcctctccgttctgtgctctcttctgctctcggctccccaccccctctcccttccctcctctccccttgcctcccctcctctgcagcgcctgcattattttctgcccgcaggctcggcttgcactgctgctgcagcccggggaggtggctgggtgggtggggaggagactgtgcaagttgtaggggagggggtgccctcttcttccccgctcccttcccccgccaactccttcccctccttctccccctttcccctccccgcccccaccttcttcctcctttcggaaggactggtaacttgtcgtgcggagcgaacggcggcggcggcggcggcggcggcaccatccaggcgggcaccatgggcacgtccgcgctctgggcgctctggctgctgctcgcgctgtgctgggcgccccgggagagcggcgccaccggaaccggtgagtgaggacgcgcccctccgccggcgggcgggacccagccggggcaccgggagaccccgaggcgtaggtctccgtttgcccacccgcctcctaggaggcgcctctcggttctcctcgccttccctccctcccctccgtggtggcgcctctgagctgtcagcgccgaggctaaagggagccgggcttggggaacagcggggttcggggtgccccgacgcctcgcctgaactagtcttctgcccctcactccgcctcccccagagccgctgcttcgcctcgtttctcgccctcttgacgggcgccgaggtgcgtgggcttctgagcattgaacaatggttctgcctcctctgccaggcgcagtgttgggaaggaggcagagggccaagacgtgtgcggcagcctcgggcgcaccctcgaaccccggggagtgcgggagcggacggggggagaaggtgagcgcctccggggacgcggagcgccaggggccggccgggcttcagagtcttccggcggccgcgagctggcgcacgttcggtgggcggcggccg

SEQ ID NO: 3 - DNA, 6000 bp, Homo sapiens
tttggaggctggataattggaagcacattaatgacatcagcagagagagggaagcaggttaaaaagggaagattatgtgcttggatttggattaattgggcttgttagaatagagatgaaccagagatctagtatagttttaaaagttatcagactacaggtcatagtagagacactagaggacagagtataaagaggagattcaagatcagatacaggtgggatgaacaccttgcctatatttagagggcatgaggtgatcataaataaggtgtaaggacctgccagagaggctggaggagattcagaatcctatcgtggaagggaggagtttcaaggagaaggaggatagctttgtgcgtcagggtggaaagtaccctgagaggttctagagaactagcagaaagaagactttacaatatcctttcaaaatagataggaattaatttatttttatttttatttttttgagatggagtcttgctctgtcgcccaggctggagtgcagtggtgcgatctcggctcactgcaagctccacctcccgggttcaagccattctcctgcctcagcctcccggtagctgggactacaggtgcctgccaccaagcctggctaattttttgtatttttagtacagactgggtttcaccgtgttagccaggatggtctcgatctcctgacctcgtgatccgcccacctcggcctcccaaagtgctgggattacaggcataagccaccgcgcccaacccagtaaatctaattttacatggggattaggtactagagtgtgtacaacaaggataaaaataaatccagtgagtcaaaattgtcatgggaaatttcccaaaaagtacagtataaatgattttcgagtattgaacttggtgtgtgtctgtgtgtgtatgcatgtgtgtgtgcacatgtatgtaatgggcaatgaatgcaagtattataggaaatataaaaacagtacaattttgaagtattttttactatgagaaatagagaaagagaatgacattgttttctgagtgtgtagagtagaattttagagtagattttcctcttttaagacagagtatcattgccttatgtaaactctcctattcaaattccaggaactgttaataactcaaggcagagaatatttgtgagtttctgctttcctagagaaaatttagtaagatacagggaagacattctgcaggtagttggcacatatttttcataatgatggcaataaaagcctttgttaataacagtgaggacaaaatgaagctggactgtctggcgctctggagtcaacctcaaaattagtgtctattagaaatcttagaaatgctgtctcttcttcagtaaaagacactgcccatagatgggtatatggtatatatccagtttggatccagttttccttaaatatcttttactgtgacttgtttgaagtacagtgccactgtcagagtaacaaccttcgttgatcatgagcctcatcatttgggaaaagcatgtgtgttgtctgggagagaagctttgggagtttacagttgacaatgagggagaactgtggggcccttctatcaacactaaagggaaatgggaggagagacatagctagattgttcttatattctttttttttctttttttttttttttttttggagatgatgtctcactctgtcacccaggctggagtgcagtgaagtatgaagtgatcacagctcactgcagcctggatctcctgggctccagtgatccttccacctcagccttgggagtagcttagactgcaggcacataccaccacaaacagctaatttttgcattttttgtaaagactggcttttgctatgttgcccaggctggtcttgaactcctgctttgacgtcccaaagtgctgggattataggcgtgaacgcccggccctcatattcttctgtggatgttaattccctaactttctcacttcccttcaagctctttttttttttttttttttaaatatatactaccttctctcttcctttgttgctaacatcaaaagaatccttaagtaggggtaacagcaacagggttggaggtgaaactgtaccttcaagccaaaaacagcctgaaggctgaaagaccagactgctggtcctggatgaaatccatgacgcagagtgagaatttctgttcctgtttgcctgcccctcccctattctgagccgataaaaagccccaggactcagcctcatggaggagactttcctgccttcgggtagggggaccacccccgcttccctctctgctgaaagctgtttcatccctcagtaaaactccccgccttgctcactcttcaattgtcagcacatcttcatttttcttgggcatggggcaagaactcaggaaccaatgtgcaaggcaaacttgtctcaggcgggcaaattgcgtggggtgcctcctgcagcaggtagtatgccccgagctaggcctccggcattgccggctagaggtccttgactggcaaagggactgagaaaaatcctgcattgagggagaggggggcgaggggcggtcgttggatctaggagtaattgccaggcttgctctagaacttattaatgcatttatatctatgaccccatcactctctatccccttattactctttctcataaaatttaccacatggtacctgtttttttttttttttttttttttttgagactgagtcttgctctattgcccaggctggaatgcagtggcatgatcttggctcacagcaacctctctgcctcccaggttcaagcgattcttgtgactcagccttgtgagtagctgggattacaggcaccccgcaaccacgcccggctaatttttagtagagacggggtttcaccatgttggccaggctggtctcgaactcccgacctcaagtgatctgtctgcctcagcctcccaaagtgctgagattacaggtgtgagccaccatgccgggccatagagtaacatctttattgagatataattcacataacatacaattcacctatttaaagggtataattcagtggtttttagtgtgttcacagggttgtgtaaccattaccacaatctaatttgagaacattttaatcaattcaaaaagaaatccaacgcccatgaacattcactctgcattccaccctgtccccagattgaaaacaactatgtgttttctgtctctatggattttcctgttctgcacatttcagataagtggaatcatataatatgtagtcatttgtgagacgcttctttcactttgcatagttttcaaggttcatccatgtgactgcatgtaatcagtacttcatttctttttattgcagaatataataatattccattgtatggatgataccatgttttatttagccattcctcagttgataaacattttgctacctgatttaaagcttactttctgtttctcacactagtatatgagcttaatgagggtaagaacatttttgttgtttcccactcagtccctagcattttgcacattgcctgtctcatgtcagtgtcaggttcaaatctatctagctgtgctttcactgacgggggccaggaggtttcacaaggactcaatggctgattaaatgcttacagatacagatttctcagggcagaacttctgcaagcattttggctgtggtcagttactttcaggttttcattactttttggttttcacagcatccgcaagtgcccatagccattatctcagctgcctctctctttactctcttgccaatggtgccaggccacagcaggtgttatcttatcacctcagtccaccatacatatgcttatcaatttgaggggtcagcaatttcactggaggctgaaacccttgtcataaatggctccattttgagacatttcagattacaaaccactgttatataccagcctagcatgtagaaatcactcagtacatttattgaacacataatttaaccattcattcacctgaccaacagtcattaagcactgacacatttgttttcaacactccctctcttccacggcaggccacttggtatgggagataaatatgacaaaggatctgcccttacgaatctcataatccactgaagtgacaactgtgcaaacaaataattaaagtaaaattaagaagctgggcacagtctcacatctgtaatcccagcaatttgggaggcggaggcgaggggattgctgaggccaggagttcaagaccagcttggccaatttagtgagaccccatctccattaaaaaatgataaaataaaataattgattttgagaaaggatgtggacaaagtgcagcacatagaccaagggcccagttctgtttgagggcattggaagcaacttccacagcaaagacttgggttgaaatttacaaaaataggagtttgccagcttgacagagaggcagcggaggtcaaccagcagcacacttaagcagtcatggaggctgacctaggcgctggacatggaaaagtagcaatcctggagctttgtatagatgtggggagggaacttacaggggaccaactaggctactgggcaatttcacattataaagaattttatatgctcaaattaaaggattaaaaattttcccccatgtacataataaattggcaaaaatggttatatttgagggtgactaaggaactctgggaaagagatcggcaaaccaggcacatgttcttgactactgcaaaagtacatttaaagtagccgcgggggatacatgtatacttttgggcaggattgtgccgtggtcctctcagcatgcagcaaagttactttggggacagtagggaggtgggcaggagccagtgatgacggaatggcaatcacatttgacctctgatctgtttatttcctcctccttgacgtctccatataaatgttacacgggcatccccacactcggatacgcacccacagtggctgattcgggggtaaccgtgtcatttgcttgcaacactggcacctctgccctgcaccccgggagtgagcagtgagtgaggctcgggtctgggcgctggctccgaatcttcgggctgggagagactccaccatctgggggcggcctgggggagcagccttagtgtcttcctgctgatgcaatccgctaggtcgcgagtctccgccgcgagagggccggtctgcaatccagcccgccacgtgtactcgccgccgcctcgggcactgccccaggtcttgctgcagccgggaccgcgctctgcagccgcagacccggtccacacggccaggggctacgacccttgggatctgccctccgctcagctcgagcttccctcgtggccgacggaacaatgaaggtaactacttatggttttgtccgtgttttacaaaaatgtgtgcgtgaatcgaaccggcgatttctccaagaaacatagttggcagggaggggaggaaggcgagacaaccatggcttatatcccccgcaaacgtctcagtatcttctttatcaatcgtagtttgcggggaccgtgcattctgttcagatttcggtttaacctccactcgcaggacgtgccttctcggactttttcacattcgcttttgggaacggaggtgaaagtctgctacagctccctcccctgcttgtgaagtttggaaaggaagtgagggcttctctcagtttctcctatgcacaggaggtggggaattttggagaggaggtctggggatgtcccgggctgtaaatgcgctttcctgcagcgtgtgttcgtgatgcaggagggagcggctggaagagttgacccgggtggagaggggagggagaacgatcttttcactgttaaaagcagaaggcccctcttattttgtttcttgtggaaattaaagcttctaggagttacaaatgatagacgcctaagggcattcatttgttaaaccagtgagcaccctaatggctctgatcttgctaatcaaggataattagcc

SEQ ID NO: 4 - DNA, 6000 bp, Homo sapiens
gggcctgcgagggaaaaaagaaaggatgaaagcggcagccgccgcgacttcaaaggccgcgccgccgcgcggggccgtgcgcaggcgcctccctcagccgatataaggcacggctcgagcgcgcgagcggcctttccgcgcgcgtccccgacccggggggcgggccgagggacgcggagggccggtgggaaggagggcgaagggttggataccgcggccgtgctacccgccggcttttcgaggccggtccccatgccaagttcaggcgcctgagaaaagtttttcagaaaggagggacaagaatgtcacgtcctgcccacgaaatgagcagtcctgtggcccgcaaaatgactccagctcccacctccattctagctccgttctaggcattccccgtgcgtgggagcctgggttcccgtcacggagcgcagccgagcgaggagggcgcgtggccgggccctgtctggctccttcggctcccctgtgcccgccttgcgttcctggttcccgtgcgctctcctaccggcgcgattcctctcccccttgggcagccttaggacgtgtgccctcgcctcccagctggcagaagggcggcctgcagagcggggtgggatgcgccccttccccgcgggccgcaggaggaggcggccctgtggacagccgcgccccggacccccacccagcgaggcagggacgcagggctcggcctgcactggcccagcgctgggaaagccgcaggagggcgcgaggggtggcggaccccgctcgctggagccccgcgtggctgcgccgagctacagacgccaacgggcgccggccccgcggaagtccgacgtccgcaggcggccggatttgggaacgactttttcacggtcccacgagttccctgataccccggagggtggggggttgagtttgtttgtctttaggaggcggcaagaagaaggggaagaacccctgggacacaaactgccatttccctcgccccccttctctccttttccgcgaagtccgttaaactgaagatgcccacagctttcgtctccgggtgaagccggggtgggaaatagagggggtcggggttccgcctctggagtcacattattcgttttctagcccttctccctggctcctgggtatcctcttccgtaggccccgccacctccttccttttggatcccaccaaagtcgtagctgggagagagtccaggccacacaaaggggaagacctggagcctgggcgggggttaggaccgagggggcggagaggactcgaggggcaccgtgcttttctctcgtccttgtaattaaggactcactggactgtctgtagccgactcgagttggcagcaaaatcgccggggggaggggttttctggtgtgagtgggggtcactaccctgtctctcctgcccgctcccgagcggggctgggctccgcttacccagtgagcagcgaggccgtctcttctcccccgctcctctgttcttgtgcggggtgggcgcctcgccccccacgcgcagttgaggcgacggcgcccgatgtagaaggaagtgttgatataaaacaagtttgttcccaaactaaacccaaaccaagcaaagccaccaggaggggaaaaaccaacagcaatccagccagcccctagcaattgttttcacggtcggaattaaatcacatcaaaacgccccctgaaacccacatcctgaaggagtgaacctacaacagccaacctccagtcgttcgctcgagttcacacgaacaacttgcctctaacatccgagtgaagggggcggcgggtgcctctcccgcaccgcacccaccacatcccggacctgggatcccactcgcacccgaagaggcggctgcttatgttaatatcagcccccacacgaattagaaaagaccgcccggtgacagaattgcttatgccaggaactacactgaatccgtaagggagggggaagaacgtcttcccggggttacttcgcccctcctgcgtcctcctgctgtttccaaaagacagacttcatgtgcaaatgtcaacctctctcccaaacgaagctttagaaatttggggcgcatggtttttactaaagccccttctaagtgctgctcatcagaagatttacaacaatcctaaagacaatcagctaacacaagttacaccactgtaaggaaaacagccacgcaaatagagcaaggtgctgggtgatttcgttagaaacaatgttttcaatggacggggtctcagtaaaataccaaacgcagccccctacccttggcccttcaagtaaacagtttcccctagttattgttctaaaaattcccatcttcttgagcttctaatcttcaggaaacctggagcataggctccaaattactcggggaatccagagttaacatgaaggagaaagtgggatctgaattagtttcagcacttaaacagcgggggggatgtaagagtcatcatttaatctctcttcggcttccagaaagtaccccctggccattctgtgttctcccctccccctcctgagggtttgatgaaaaggaacctctactctgctttggtgaaactgcattttccacttgttttcctattggtcaaattggtgcagttatgggaggacttttgactgttttcccatgtgtcttttaagaatggggctataaatgtctgacacagctacacgttcacctctctgggacactactcacactggtgcctaactttaagggaagtgacataccaccatcatccaaaaacaaaaattgggtttctcacacactgtagcagaatatactctttttcttctcttgaggcatagcattgtcagctattaaaaatggatttaatgttttaattttcctggattccttcaccaaccccttaatttcaccccaatcttccagatagaatttacatgtgactactggccatgttgtagggaccaattggatcctttgtaaagttttaaaaattgcttcctagtaaattcttattcccaagaagtagtcgttattagtaggtgaagtcattagtgctcacttagatacagcattgtaaaaatctttacccattcaatgttcagcagcctgaaatttcacctttaggaaaaaaagagggatctttgccagacaattcctatataatggagcaaaatctgattctgtagtgttttgcttgttttcgatttaagggagatgaagatacatttctttatgtcctttgtttactgttctgaagttttacagatggttactgtattggatataataattttgcctagatttttaactgagggggtttgagaaccaagggacaaaatgtaatgtgttttcaaacttcagcttcccttctgctgtaactttcacaaagtatctcctgaaaactcctgtctttgtacaaaattcatcaaagagacagtggagactggggaatttttgaggttgtattcggattggtgtcttcaagggtccctttcagttcgcagtccaaggtgccagggactaccccgtcctccctccctcttctggctttgctctcctgagtccttttgccttctcttcccccttcttggattatcttttcattctcgatgaggttcccacacactgcggtgtgtgtctctgaaaacccactggagacctagcacaactctccgtacatcccgtggtgagaacagaatgaaagatatattgtttaaaaagcaataattaaaatctagtcttcagttccttcttcctcgtcatattttttctccgtaagcctagagattttattttcactagtgtgttcccttgtctccaaagagcgtgtgtgtgatattatattcgggaaagctacaactctcttttccttgtccttctgttctctcttaatagttgagcaatgtctgttatattttccccttttcctttttttctcagtcccagattcccgcctctccccactgtcagagcatctatcaatgtggtgtccatcacagcggcagcggctttctctttcatcttcctccctctgccagagccagggagggagagtgggaggcgtcaaggaggtaggggagagactggcagaggaaaaggagtgggtgggtgggggccaagtaaatagatacttagatgatgaagtcaagccactgcggcaatgtttcttgtcagtttcacgcgggcaaagcgtgcctttcggtgggttataagcagcgcccggtccttccttctctcgccaagttgcctgatccttccctccaggcgcgcgcgcacacaccacactcacacaccccaaaaccaagactcgtcctacaggatctgggaaaagaaaaagaaaaaaaagccctcaatcaccacctccttctcgccgactccccctcaccccccgcctcccctccagcgggcagccaaggagagctagaggcgggggaggggagagggaggagaagcgacgcaagtgggtagcttttcagcgccggcgaggcgcgggaggaggagaagcagtggggaggcgcagccgctcacctgcggggcagggcgcggaggagggacccgggctgcgcgctctcgggccgaggaaccaggacgcgcccggagcctcgcacgcggccaagctcggggcgtcccctcccctcggccgggcgaactcaaggggcgcagctctttgctttgacagagctggccggcggaggcgtgcagagcggcgagccggcgagccaggctgagaaactcgagccgggaacaaagaggggtcggactgagtgtgtgtgtcggctcgagctccgggcagaggcatttgggcccgaggcccccgctgtgactccccgagactccgcagtgccctccactgcggagtccccgcgcttgccggcaaaaactttattcttggcaaacttctctttctcttcccctcctcctcggcccccatcttctgctcctcctccttctctagcagattaaatgagcctcgagaagaaaaaccgaagcgaaagggaagaaaataagaagatctaaaacggacatctccagcgtgggtggctcctttttctttttctttttttcccacccttcaggaagtggacgtttcgttatcttctgatccttgcaccttcttttggggcaaacggggcccttctgcccagatcccctctcttttctcggaaaacaaactactaagtcggcatccggggtaactacagtggagagggtttccgcggagacgcgccgccggaccctcctctgcactttggggaggcgtgctccctccagaaccggcgttctccgcgcgcaaatcccggcgacgcggggtcgcggggtggccgccggggcagcctcgtctagcgcgcgccgcgcagacgcccccggagtcgccagctaccgcagccctcgccgcccagtgcccttcggcctcgggggcgggcgcctgcgtcggtctccgcgaagcgggaaagcgcggcggccgccgggattcgggcgccgcggcagctgctccggctgccggccggcggccccgcgctcgcccgccccgcttccgcccgctgtcctgctgcacgaacccttccaactctcctttcctcccccacccttgagttacccctctgtctttcctgctgttgcgcgggtgctcccacagcggagcggagattacagagccgccgggatgccccaactctccggaggaggtggcggcggcgggggggacccggaactctgcgccacggacgagatgatccccttcaaggacgagggcgatcctcagaaggaaaagatcttcgccgagatcagtcatcccgaagaggaaggcgatttagctgacatcaagtcttccttggtgaacgagtctgaaatcatcccggccagcaacggacacgaggtgagcgggccgctgccccagttccgagaggcgtggcgggtccctgggaaactcagagagggaggaagggaacgaaggcgcccggccgcccggctgagggtcccgagtagatccctcgtttgttttggggtg

SEQ ID NO: 5 - DNA, 6000 bp, Homo sapiens
ttccaattccagcacttattaaactagagataatatgttaatattaatttgctttaattaataaaatattcctagaatatgattttaaattcacatgacattcggaagtcacttatatttgcagtattcaagaattacatgaagtatgtgctcattaagagcgattttaaattttatcttttgtcaccacctggtggtagaacattttctcacttttcttttttcattttaagccttacgttgttgctaaggaaaatttctaaaccagggaaaccagttaaccagtattgattgtcaagtattaatgtatactaaacatactgtatgtacttaatatctattgaataaatgaatgagtttttaatctgttttagtggattgcaaatgtacttaatcttttcatttgaatgacaagaagttctcaaatgtaatgaataaaagcggtccacagtattattttgtcagaggcagttttctttctttaaagtttaattggatttttgtttatggtaatacaaacacataattaaaaagtagttgatttaaaaacgcattttattatgccctcaagaataaattcatttaacattgtaatatttttaaaatattttccataatactaggaggtaggagaatatttaattagaatttattaaacatgattgagaagatgtgaaacttttgcaaattcttaacttgaactattaagaataaaaaaggaaaggaaagaaaaaaaaaaaaaaaacaccaagtcgcacatcatttgttgtagaccatcgccaccttgtgtttggagaaagatgtactaaagtctgagaatcttttaaggtggaaattttttattgctggaaaattcctatttataattaaaacaaaactttactggaaacaacatcattccaaagtctgacaatataattacctcctacacaattagataggttaaaatgtcaaaacagttgattaaaagttatgagtcagagtcatttctaagcccccagtttgactctcgctatgacatcttgggaaaactacttaacccttttgagtctcatttctgcatcagttacacaaagggagtcgatctggcagatcatactcctctgagttctgtgagggcatgatgtggagggaatatcaattttgagtctaaatgcaagctacaataatttttctgtctccaatatttgcaatacttctgggtatataacctgtttaaactagaagttttctaactactttctcatttgtgatcaattaaaatatccatttgtccaatattactttagaccatatgttcccaaaagtaggactaataccaaacagcttccctatttctaattagtcaatcttatggtactaaaatgtgaataaaaagcatttcccggttatgaaatatgcacattagttgtttctctagacaatgtttacattaaaacaattctaatagctcatgtatattaccagatttcctcatttcatggctacttgttgaatacttactttggtatagacgtcgtgaaaattgtgaatagaatattgtgtctataacatatgaatctgtgaaacaaataagaacacataaggtgtaaatagaaattgacaccttgatgcttatctctcactttaaaatgcagacaacttgttctttttttcagacagtccctctgttcatagaggacaataatgtgtttaataggtcaaactgttaattgttccaataattttatgtcaaatgttttgagttttgttctgttatctctagaaataaaaattagcttacatatgtaaattagaacatgttgagattaatgtttatataagcccatatgtattctataaaaataaaacccaaaatatggggagtagggattaggatagcatgtgttattttgggtgcccattcaaatcaaggagcaaaaattggattatgaaactcactacaagaaccccatattacatgtcacttttactagtgccttgtacaaatttactcctgtggtcttgtttctacattcaaatgtttttccaattcacattttgcttataaatatacatatatgtcctatgtatatatttgcatattaccacaaatgcctgatgagtgctaatctttaaataaaagagaaaaagtaagtggattaaatgttcttctgagcatagatggagtttttcagcttagtagttggcaactccaacatccatgtctctgttgaagcgattaaaaaagaatcatttcccagaactacaggtgcacaacagattggagtcattatgcaaaagaacagaaatctggatagaaacccagagaataaaaaagccatgttcccggccatccttttgcctttaactcactgttttttcaaccctacttgtatctgcaacatgaaatatgaaacaattataatggatttgtagtaacccattcaagatcagaaatgtatgcttttaaacaaacctccaataagaataccctgcaggtagaaacacactaaaggtcaaacttacgttaacatatttttaaaagctaaagtttatgtagagaagttgatagactgaaatacattacatatgtctttaaagatacagattttctgctgtttttgtccctttttgccccaatttaagggaatcacatctaccttcactcatcttcattcagcctctgggccacctctccttgagatggagattatgagtgtccaaaatctccatctcaaatctccatctcaaagccactctgaggctgtaactgttgtcaccatatattatcttctgagcccttttctaagcaagaggttgaaaatgtacggatggctttgccttcaagcttttgtgatcccgcggtcaatatcttgaaagtctaacatgactttcctcatatgttctctcaagtatcttgccttttttctagctagaaagaaccagtaaaatgaaatgaaatcatagaaaatggaccgtcaaaaaattactgtaatagaagataacaatgttaaaaaaaaaagtctgaaaaccaaactgggaagtaggaatgatcagatgtttgggaaaagacgcttgggaaacagagaaacaggaaggaataatcctcgtagttcgaagtcgaagagaaggaggtaggctggacaatgcttgacaatgcagaaaggaatcacacactcaggtgtgcggatgtcaatgttgagtttgaaggagaaatgcaacggcgggagggggggagagacagcgagggctgcaaaggagagactcagtgaaaagaggtaggcagaaacactatcagaatgttaatcgagcgctgtcaaaatatatctaaggccttggttgattattcaacgttcaacgatgagggtgattttaggaaaccaaaattaaatctacgaaaccacccactcctaaatgtgtagggactagaggtcgttactaagcccttcagaagtaagctgagttgcttctctctgccattcttgctcatttgatttttcctgatgagtggaaagcaatgtttttgtttttgtttttcaagtaagcaatctcgctaggaaaaaagaagttggaaagcatccggaaaagaaagcttgtaagagggacgtgtgggagaactagaagggacgcttctggctggggccaactgaagtggggaagatctggggaggagcgaggaaaggacccagatctacttggagccaaccaagagaccggacgggagtggggcggaaaggcggagaccagttcgagcactaacgcgggggcgcgcgagtgtgagggttgcgggtccgcccggggctagggcggtcgctctcgccattgtccccgcggctttccgcctgtgaaacacgtccttcctctgggtccttgagcccctcccactttttggagagaagagccactcagttttttttcctaaggacctgttggtggacctctcctcgctttcgtaacgcggatatagccttttcccttcctggtaggaagaggaaggaggggtccgggaaggaagccgatttccttctttccccctctgcacgcttgctagccccagcgatcgctgctggcccccgggtaggaaagtggggttcctggccgtttctgcgacgctggcctagggcttgcagctgctgttgagtgaaagcacgcagactggcgggagccgatcatttctcgaatgaagaagaaaaagcgcaattccctccttatgctctagggaattgagccgcgtcccagatcacccattccagaaatgtgaaaccgggccctcacaaagtcgtctctggtgaagaggtggcgtgcggggtgggggttggtggagggtgaaggcataagcaaacatattttaaaatccagatcgtaggaagtgtcacctggcccctcacccaggcatgctttctgggggaagcgcagggccaagctttccctagaaaagctggggcgaagagagagcaggcggcggctaaggagctcctggcaggctgggaaggtggagaagtggggtgaggtatttttctagaaagtgtagccctagctcatctcctagattggggaagagggaactgagggaggagggaaggagacccagggcagctccaggatagggaaatgttgaagaagggactgcgttctccaaccgaaccctccctcctgggaaccgcagcccagcgcggtaactgagttaccgcaaccgggcggtggggaggaagggtggtccaggaaaccggcgagggagaaaagcggtggaagggagagtcttctccctggagcggccccagcagtacaaagtgctggtcacagcgccccttccgcccctagattgacgagcagtggcgtggagccagcgcggaggctgccccctccccctcccgagcccgcagcgcggagcgcggtttagcaccaacggagccgggggcggcgtctttgggatggaaaagggccaaaggggaggagtggggtgggggtgggggtttcactggtccactataaaaggaccgctcggctgcccggttcttgcactcgctggaaagcggctccgagccaggggctattgcaaagccagggtgcgctaccggacggagaggggagagccctgagcagagtgagcaacatcgcagccaaggcggaggccgaagaggggcgccaggcaccaatctccgcgttgcctcagccccggaggcgccccagagcgcttcttgtcccagcagagccactctgcctgcgcctgcctctcagtgtctccaactttgcgctggaagaaaaacttcccgcgcgccggcagaactgcagcgcctccttttagtgactccgggagcttcggctgtagccggctctgcgcgcccttccaacgaataatagaaattgttaattttaacaatccagagcaggccaacgaggctttgctctcccgacccgaactaaaggtccctcgctccgtgcgctgctacgagcggtgtctcctggggctccaatgcagcgagctgtgcccgaggggttcggaaggcgcaagctgggcagcgacatggggaacgcggagcgggctccggggtctcggagctttgggccagtacccacgctgctgctgctcgccgcggcgctactggccgtgtcggacgcactcgggcgcccctccgaggaggacgaggagctagtggtgccggagctggagcgcgccccgggacacgggaccacgcgcctccgcctgcacgcctttgaccagcagctggatctggagctgcggcccgacagcagctttttggcgcccggcttcacgctccagaacgtggggcgcaaatccgggtccgagacgccgcttccggaaaccgacctggcgcactgcttctactccggcaccgtgaatggcgatcccagctcggctgccgccctcagcctctgcgagggcgtgcgcggcgccttctacctgctgggggaggcgtatttcatccagccgctgcccgccgccagcgagcgcctcgccaccgccgccccaggggagaagccgccggcaccactaca

SEQ ID NO: 6 - DNA, 6000 bp, Homo sapiens
gagtctggctctgtcaccaggctggagtgcagtggcacgatctcggctcactgcaacctctgcctcccaggttcaagcgattctcctgcctcagcctcccaagtagctgggactacaggcgcgtgccgccatgcccagctaatttttgtatttttagtagaaacagggtttcaccatgttggccaagatggtctcaatctcctgacctcgtgatctgcccacctcggcctcccaaagtgttggaattacaggcatgagccaccacacctggccaaaaactgctataattctaatatgacttagtatatgttatcagtaataattataattattacgttaaatgactgtgtgccacagaggtaaatttccttgtcaattgtgcctttaactgtggctgccctaaaatgtttttgtcatccacagacaattgttgtctcactttggtcctctttaaaagatgattttataatcagctataaaatttaacaggtgctcctaaatgtgagtttctgattaattactctgggagattgtaaaattagaattgaaaaatactttcaaatagaagagtgaatggtgtttggttttctttggactgtatttgtataaatatgttattggtatgtgttccaaaattacgggaaacttctataatgttgatataatttagtgtacattatcaataatcataattgatatgtaaaattgttgtatgccacagaagtaaccaaaattcctagccaattgtagctttaatagtggctatagacttttgtcatccacagacattttgtcttcctttggtccttttcaaaaggcagtttataatcagatataggactctgaatgcaggtctcagataactttaaaaattgagctattggaatagaggaaaaaccaatcttctaggactctcatggagagctaatgtattaaacattgctagaccctttgttttcagagtcaagagaacttatttctttagagctatttgcaactgttaacaagtgagtaaaatatactgctgtggacaaaatttggagcatatttgttcctctctacctgatttctccagaatttggaaactatctgtgagtattctcaatttatggcagtatagttaattgcataaattcaataagaatttgttttcttttgtaacaggacacaattggagaaattggttactttaccaaggctttgactggaatggcatgcttcctttaaataatcaaagttgacttatagagcaaattaaagcccattgaggcatctggcctcataccttatccacacagagtccctgtgcaaggttcctgtcctgtggtaagtaaagaatgtcactttctaacaggcccaggaaccccaagttatcttgggacctcaagaggagaggaatttgcccaactcataggtatttgagggtgcaaacccacggctgggctcggcttttaaaacatcttatctgagattcttcatggaacagagttctagcaaagccaattaaaaaaccctaagtgaaaaatattcttgctgcactttatgcaaataatcaggccacatacagtaagactaaagcttattttgtaaacaaatcagttctatcatgttgtttttaataaaaatggggactggagagagaaaaattatgcttcaaaaaactatagtacactgttgttagctgttcttgagtttttttctgcagtttagactaaattctaaattgtttgtgggttagaagtccccaaactaatgctttcaaatctctgcttttaaaattgggaattgtactcctcatcctaggactcattatttaccttataaggtaaaataggctgttcacttaaacactgtagtaaaactatagatgagagtactaatgtttttgccatacaagccttggaagctcaaccaggccggcatgagtatgctcagacaattaattgtaaagcagttccactcttctcaccttggggttcactcccaatcccactacatcccctgtcagcaggaagaggccagagtgattgatggccttttcccatcttcatagcctataccttaagattaaggtattataaaacccaaagggagggattgaaaccgcctttgtaaaattatgactgagagagtgaaagagatctaacttagctgactccatcttgcttctaacctccaagctgttcttgttcattcctgggggtaggctgaactaacttcgggagaaatgtagtttatagtttatagtttaaacaaatatggtaacagccctttcccaaagcagacctccttcctgcctggcgactagattgcctttgtaggactaacattagccacaagatcagaaattatggtttaggggtcatgcagctggaggctataagattctgagcctccctaaactgctccaaagatcagtgtttgagatattttgtagaccctgcacttgataaatcagctggcaccacccagatcaataaactggctcatgtgatcttatggcccccacccaggaactgactcagcacaagaaaacagctttgactccctatgatttcatccttgaccaatcagcactcctggctcactggctttccccgacctaccaagttatccttaaaaactctgctccccggccaggcatggtggctcacacctgtaatcccagcactttgggaggccgaggcgggcaaatcacctgaggttaggagttcgagaccagcctggccaatatggtgaaaccctgtctctactaaaaatacaaaaattatccaggtgtggtggcatatgcctgtaatcccagctactggggaggctgaggcaggaaaatcacttgaacccaggaggtggaggttgcagcaagcctagattgcaccactgcactccagcctgagcgacagagcaagactttgtctcaaaaaagcacaacaaaacaagcaaacaaaaaactttgctccccaaatggtcagggagactgatttgagtaataaaactctggtctcccgcatgtgggctctgcgtgaattactctttctctgttgcaattcccctgtcttgatgaatgggctctgtctaggcagcgggcaaggtgaaccccttgggaggttacagtttcaccatgctggtcaggctggtcttgaactcctgacttcaggtgatctgcctgcctcggcctcccaaattgctgagattataggcgtgagccaccacgcctggccatgcatcacatttttatttgtaaaagtaaaaaccatggaaacaacatcaatatctagcaataggatgcaaaatgaatgagaactatagtacattcaagtgatgctaaagttttatacaatcattaaaaatgattgtttagggctgagcatggtggctcatgcctgtaatcccaatgctttggcaggccaaggcaggaggatcgctggagcccaggagttcaagaccagcctggttgacataaggtagccccatgtctacagaaaataaaaaataaattacccgggtgtggtgacacgtgcctgtagtcccagctacttgagagacttgtagtcccagctacaagagagagcctctcacttgagcccacgaggttgaggttgcagagggagaccctctgcagggtctcaaaaaaaaaaaaaatcgtgtagggctgggctccgtggctcatgcctgtaatcgcaacactctgggaggccgaggcggaaggatcccttgaatccaggagttagaaatcagcctggacaacatcacaaggctctgactccacaaaaaataaaaaaattagccaggcatggcggcatgtgcctgtgatcccagctactccggaggctgagatggaggatcacttgagtgagactttgtctctaaacaaaacaaaactctgtgtgtgtgtgcgtgagcatttacagtgctaaacaactttaagtaccacactaatagtgaaaaatattacaggagaggcagcagagcaattgttaagagcctgggccctagaaatgactgcctaggtttgaggcctggctctccacttactagctgtatactcctgggcaagttacctaccttcccagcccctcaatgtgcccattcatagcatggggactcatacctagtccatagtgttgctgtaaagattaaattagttaatacaagtagagggcagcgtctagcatctagtaaacagttgacaattattggttattgttatagaaaattggaggagggagaaatcatatctaactgacaatggatcaggaaaggctttatagaggaggtgacattaaagaaaaggtttaatgctaatgaagagtgatggtggggggcggggtcaaaagatagggagttaaaggtagaggaggtggtaaggcgtaggttgtgtgaggccgtgagtagatagatgagtggtggcgtgtggcagtgggagccattgaaaactaaatctccaaagagagacaggggtcaaaatgtggagggccttgaattccaaatttaaaactggagttaaccactggctatgagagtcattaaagatttctgagcaagagaaagaggaagccttctttggcagcattgaaggctgacaaatttgcagttttatccttgagtgttacgaacttcagaaacaactctctgagggctaatattttgatttaggaaaaggaaagggggacacaaaggaagagatggaaaaagggagtgaataactgaaggatgataagtgggagggggagatgaaaagtgagcccggtgggaaggtggcagcaaagcctgtcttccctaattcctcattcctggggtcacttggtgactgaactcatacataacctcccttctccccatttaagatttgaagtttccgtctttcctttagggcttcatttaacttcgagactgtccttttggcctgtgagcacacgtagggcattaggacccagcgtttgttgtagtgagagtggttgaatctcgatctctcaatttttctctcgagctccctcctctccctttgtcattctagctgcctgctgcctccgcagcgtccccccagctctccctgtgctaactgcctgcaccttggacagagcgggtgcgcaaatcagaaggattagttgggacctgccttggcgaccccatggcatcccccagaaccgtaactattgtggccctctcagtggccctgggactcttctttgttttcatggggactatcaagctgacccccaggctcagcaaggatgcctacagtgagatggtaagtgaagcaaacgggtgatgaggagcgcactcccatgggattgcgaggacctctccccttttttccttctcagtttctggtcccacccccttagcccctatccccacctggaccctccgttctcaacaactttgcagctcggaaggagcagctgggcaagagcgatttcttttgtgggctatgctgttctggagccactgaatgccagttgggggaggggttgcgcagcgaataccccccatcccaagtaaaccagaaggctgagacctgcgtagcacctgtcattggcaggagcccttccctccttccagcacacacccaaagtccgggcaaccagtatacaagtctgattccctccctgtgagctaagagtttagcaagcggagagtttatttattttagagcagaacaaaagggaaagaggaaaagagctgggaaaaatgggctactaaaacaagcaatttttaggggctgactggtattcctcatcccaggcagacagctgatagtattcctccagccacctgggtatgtatctggatccttgagacaaagcattcttggcccaaataaaggtcactaagctcttgtttcttccccttctctcaagggagagctagatgttttgttttattttgttttgtgtgtggggtaatctacaaaatctgcaaagtctgctttttctctcccgcaaacagtccgtaatccccaccttgccttctgtggatgaccagagccaggccctctgc

SEQ ID NO: 7 - DNA, 6000 bp, Homo sapiens
agcctcgccgccgcctccgccgctgcggggtgcgcgtccatctggttggggctcctcatcccaacaccctccccaacggcccgccgcgcagccgcccgcgggcgagtctgtagcctgatcctgcgcggacccgccagaggcacaccaggaggtggggaaccgggggcgcccggggcagaccggggtgggagtgtggggagccggggacggagtgtggggagccggggacgcgcggaaggtgccgggggcgcgcggaggagccgggagcgccacctcagtccccccaccgccccaccccgcgcatgctcccaagagccccagaccacccttctccggcttccgagatacttcatccgttgcttgtcctggcccaccgctcagtcccccaactctaggacgacagaggttagggataaggggaatgagacacgcgccttggctgcagcattcaaggtgaagccaactcaatagtcaaaataaagacttttatacaatatttttacattttaaaataaaatgtaaagataaaatttcgtgaggagctgtattggcatctacagcaaaaggaaaagtcagtaatcctgagccgtctttgttgaaaatttttgtactctgttcactgtggattttttggcattgatttttattttaaatattgcatttagatgttttagtttaatatttatcatgactactgagtgaatcccgtacattttgtgccataggtgagtacctcactatggtacagctctaccctgctgccatcttcactgtggtagtggcagaagtctagggggatgtaagtaaccacctcctccgcagggtctgttaggggttagcagggaacttccagaggctcaggcacaggagcttacatggcccccaggcttgtcccaggacaaggtctcagggaagggcggggaaaagagatttacaccagctttctcaatactgacccctgcattactaaaaagtttattaatcttctttctgttaagtcataattataataataatttcattattttaataataataaaataaacctcaataacacctaatatttaatatgctacttattaataatacttattattggaggcttgggacaattagttctctgtgcctctggtctcaaaagaagtgatgcaaccaagactagttttctcagtgctactttactgaggacctgggtgatgtgaaccaaagctttatcaggaagatgatttgagatgatttgcagagttgtcctgtttctacaggattcactggagtgaattcctattattgaggtttcttattttgtcattgttaaaataatgaaattactattataatcatgacttaaagaagattaataaactttctagtaatgtgggagtcagaaataagatttctatttaatcggggctaaattcctgaatttactatggaagcaaataaatatctggctttcttatttcatatctcttttagttgatgagtatttggttttgctttttttctccttgttaactttaaaaaaaaaaccacacaatttataaatttagacaagaagagactttcttatacgaggttacagcctgcaaggtgggatcctatgctgggaagcacgctgtattattccgttttcatgctgtctataaacacatgcctgagactgggcaatttacagaagaaagaggcttattggatttacagttccacatggctggggaggcctcacaatcatagtggaaggcaaggaggaacaagtcacatcttacatggagggcaatagcaaagagagagcttgtgcagggcaactcccatttttaaaaccatcagatctcgtgagactcattcactatcatcagaaccgcaggggaaagacccgcctccatgattcagtcatctcccactgggtccctcccacaagatgtgggaattatgggagctataagaagagatttgggtgtggacatggagccaaaccatatcacatgccttggccaagatcagagacaggcactttgaaggaggagggttggggtaggagctttatgctcaacaggttggctaaatatacatattcaacaggtgagagaagaagctatgaatattcatgaaagtggtcctgatgcatgtgtatttaacaaacatgcatgttacatacaactcatgttcattttggggtggttgcagcatttaaatgtattacaattcagcctgatacgtcaaaaggtcttttcaggacatgaaggcatgcaagtgtgcaacctctgtaagtcagccagaaccatcctatagtcggtagtcttatcaggagaaagttactgaaatcagtctcttgtccaatcaagctgtagttatggctggtggaacaaggggtcggttagtcaatatctgtgatttggatgagttgtaattgttttaatattgcatatcttcagccgggcacggtggctcatgcctgtaatcccagcactttgggaggccaaggcgggtggatcatctcaggtcaggagttcgagaccgagaccagcctggccaacatgacaaaaccccatctctactgaaagtacaaaaattagccgggggtggtggcatgcacctgtaatcccagctacctgagaggctgaggcaggagaatcacttgagatcatgccactgcactccagtctgggtgacagagagggactttgtttcaaaaaaaaaatttatatatatatatatgcacatatatacatatctatatagatacatagatacatatacatatctatatagatacatagatacgtatatatgtatatacatatatgtttgtgtatatatatatatacagagagagagagagagagagagagagtgagagagagagagaatcactctgttgtccaggctggagtgcagtggcacgatctcggctcactgcaacctccacctccctggttcaagcaattctcctgcctcagcctcctgagtagctgggattacaggcacatgctaccacacctggctaatttttgtactttttgtagagatggggtttcatcacgttggccaggctggtctcaaactcctgacctcacatgatccgcccgccttggcctcccaaagtgctgggattacaggtgtgagccactgtgcccaagccatgttccctatcttctctgagcagggctggggaaaacaaaaacaaaaatattgcttatcttcaagccagtgcttgtttagctgctggagaaaacaaaaactctgtggcagttagaacatagcttttttctttaagtgtaagggtgcgtgacttaacccttcctggcatggccttagatcctgtttataatttgttatcgtattgccacaaagagtctgttctgtcagtcttgtgatctctgtattaacattaaggctgctcagttgtgtctaaactctaaaagggagaggatgtaatgaggcatatctgatttgccatcccatcatggctggaaactaagtctttaaggtttttctggggtctgcttggcccagagggggttcattcagtaggtggggggcataggattttatttttagttcacattcacaaaaacaaagggccaaaaaagtcttactgtgtcacacaggctggagtgcagtggtgcaatcttggctcattgcagcctccatctcccgggttccagcaattctcctgcctcagcctcctgggtagctgggattacaggcacccgccaccacacccagctaatttttgtatttttagtagagagaagattttaccatgttggccaggctggtctcgaactcctcacctcaggtaatccacccacttgggcctcccaaagtgctaggattacaggcgtgaactatcatgccagggctatatgtctgtgctttctaaacccaataaatgtgatgtaatattaatgctaacagcacacgtgatgggccagaaacatttctataagcccagcggctctgggcataaatttctagggatggtgaaccgaagaaacaaaattgtgtcattgaaatcagcttttcccaaccaccagtgtcttctctctctctctctttctctctcagtgttcacttattacatggctactctgtgccaagcactgttgctaaacacattatgtacaatttctcatttcattggtactgattttgacacttactcatccactgtcttttatcatgatgtgaccatttcctacaaaatgccctatgtagcttccaaccaaaataccacaaagcacaacttcagcagtcctgcctcttgaccttctcccaggctctgctctcgctcatctgttccatcctttgcattggcagaagacccatctttctaaatgcttactctcttggagcatgtaatttctttcctaggaatcaccattctcagctgcctgactccaagaatcgttctcagttttatcttctgatgctcctagacctcagcaccttattccagcctaacacatctggcaactcactgttcccagagctattcaacatgccttccacctcagggctttacttggcctgtaatgccctcttcctctctttctgccaaagtagcttaatgattaggaatataattctgaagtccaaccatgggcaaagccagctcctctgctgacttggtggatgaccttgaactaaatttcttcccttctcagagcctccaatggacagtaaaactaataacaacacctccctaccttagaggttgttgtataattaaatgagataatatacataaagtgcatggtgcagtatctggtacatagtaaagatcaataacctgatgttatcattgttgtcgtcactattattatttcagaccttggtttctccccactctttcatgaagcccttatctaaccactccaggtcaaaatcatctctcttttctttgaattaacttacttttcctatcactgatttgatgactaggatttattgccttaagctttacatcattcctttccgattttatttccccatctcaggtaaaaactcctggaagaaaagatcctgcaatttggctttttgtgagatggaaaagattacaccttgccctgcaaacttcccccctttaaaggcgaaggtttgttaggttagttagcctgtgagaaaactgtgcgttcttagcaatcaaaggccagacatctgggggtacaggggggaggaagactaggataagagactctagacggggacagaattaaaaggaaaaaaaaattaaataagcctccgtctccttttatctcctagcagtaggcagtaatttaataaataaaggagccccgttagcgttttccctgtccattctttcccaggcacggtgacctagacagcagcaaaaagcgagttaatagggaggggttatgtaggaagcaaaagtcaaggaatgtggctacagctgattacaggaactgagaaagtggaccaaacaatattgactcccagcacgccaccgcgatgtccatcttggggaatccgttgctggaagggacccatctcgcccacccttaggggtcgaggtgggcgaagggggaggagagggctggcggggcggggcggggttgctccgcccccggaggctgggctgtgaccagcaggcggctccacagagcagcgggcgcgctcataaagggcacagccgagggtacgtggatcgcggtgcggagactgaggttagaaggcacaggtggcgagatgagccgggtaccagcgttcctgagcgcggccgaggtggaggaacacctccgcagctccagcctcctcatcccgcctctagagacggccctggccaacttctccagcggtcccgaaggaggggtcatgcagcccgtgcgcaccgtggtgccggtgaccaagcacagggggtgagtgaggagggtcggggtcaggggcaggagaaactggaaagcggggaaaggaggagcaggaagaggaggggtgggagaagggaagagacggcttgcctaaccgttgctaacagctgcc

SEQ ID NO: 8 - DNA, 6000 bp, Homo sapiens
gtagcatttattcttggtgacttttcttggaagtattgacttgtatatagtacactacttaaacatgctagaaactttattgaattcgccttcaatactttggtgtttagtttttaagttgctagctaattgtaatcagttcagaatatcattgtctattaactataatatgcacttagggtgaaatcaatgttagcaagaatggttgtaaattcatacttaaaacagtgttctttataatccattattttggtcaacttcttggcaaatctgattagtcgtcggttttttaccttgcaatgtggctcccaaagagtatcagaaacatcagcttggctgggggtttttgcttgtgcttgcatttttaacactgtctcccttggttcctgctgtaacagtagtttacttaaatatcattcataagtctccttagaaacagaaactgcaacatgtggcaatatattgaaagtgaacaaaggaggcagccctcccgctgcccctcactgtgtatcctattgctgccatgcccccaacactccttgtatctgcccacttactggtcaacctggggtaccagcatcaatcccaacattaactagtagtaaagcttaatttcgtttccccccttttttttttcagtaaaaaataatgtgtgtgattagaagtttattctggaatttcagggatcatcttctgtaccccaccttgaagactctggctctagataagtagtcttaaaaattgcgtttgtttttaaccttagaaaacccatctttttaatgaaaatgaatatgaaactttaatatttttttaaaagacagcaataagactgctctgattggctttaagatgcctttgtcagagttcagatctcactgcttactctttttctgccacctcctcaagctgatttgaagattcttctatgcaaacctagttttccttaaaacatagttggaaaaaatcttctgccaagccgagatctctaggcctgccctcaccaatgcttacttcctctccagctgttaaggaaccaacacgtttttcaaaaactggtatatgaatattcacaatttggggactagtaatagcccactgaattactttacatgtccttactgtactttatgctacatcttatttagggataaaaacatctaatagagtaaatatgaaatggtggcatttcagccactaaaataggaaaaaaatattgtttgggttggaagcccttcctgtgtgttccccagtgaccttgaggttggaggacatgtgatatctgttctgttaacactggtaaaataaaattttttaaatgtgctgatgagagaaactgcaaatacataaaccaaataaaaatttaaaatacaagggaaataactttaaaaaagtggtcataagaaaattatgaaaagatctttaggatatcaggaaatggaccatctgtgatattcttttagccaagataaataacactaactgctgtaataattgacctcaaaatgtctggctcaactcactgaatatctatttatcactcaaatcacagtacaatgcattctgtgaggaggctctgctgtaactagtcattcaaggactggttccacactgcagtgctaatagcttcaaacacctggcttcaaggttgacctgacttcatgtggttgagacaggaagataaaagagaatggagagacacacttctctactgctcagcagggatcatattccgttgatgagaactaatcatgtggccctacctatatgcacaaaagttgagaaacgtcatttagctatcttggaagagaaaacaggtttggtgagtatgtagccaggctttgtaccagatactcaatttgtagcttaagtatcaccaggtatgactccagaaatctcttgggaagcctccaccactcttttttctgcctgctttaatatagaaaccttcatgccagcactaacttcatctcttgctgttcctaagacaagccatgatcttccatttctttatacctttgcatgtgatgtctgtccagttctttgaaatactccttcccttctaacctcctcttcttccaaatctaacaaattcttaatctattaagacctaagacaatgtttactttctttatgaacttctgacacagaaagcacagatctcttcctaacattcactgaacttatcttttactttgtacctatctcttttactgactgcctttgtacctatctcttttactgactgcctaggcctaggtctaggaactagaatgttttcaaaaggattgagtgtgctaatattcacaaactaattaatatgtcagaggggtctgaaccagaatgactccatcttgagtagaggctgggtacactaaggctgaaacctactgggctgcattcctaggaggttaggcattcttagccacaggatgagataggaggtcagcacaggatacaggtcacaaagaccttgctgataaaacagaatgccgtaaagaagccggccaaaacccaccaaaaccaagatggtggtgacagtgacctctggtcaacctcactgctcattatatgctaattataatgcactagcatgctaaaagacactccaccagcacaatgagtctacaaatgtcacggcaatgtcaggaagttaccctatatggtctaaaaagcagaggaactctcagttctgggaaatgcccaccctttccagaaaaactcatgaataatccaccccttgtttagcatataatcaagaaataactataagtatactcagtcgagcagcccatgacactgctctgcctatggagtagccattattttattcctttactttcttaataaactggctttcactttatggacttgccctgaattcttcgctggaggtccaagaactctcttttggagtcaggattgggacccctttctggtaacaaattgctttagcttcttaaggtcaatgaccaagtcttatgtaccttgggatctcctatgcctacccagcacaggcttggctcacctattgagtaactaaggaaaaaatgaatactttctccctttctgacacttccaagttgtcagcaactttggtgtctatttttgtttcatttttgtattaatatttttatattgtcataaaatataacaatagttaccatgttaatcatgttctagtgttcagtacacgctctagtgtttagttaacaatgttctagcgttcagttctatagttcagtatagtacgaactatatatgcacctcatgcaacagatctctgtaactttttcttcctgcaaacctgaaacactatacctgttgaacaacgcccccttttcccctctccccagcccctggtaaccatgattctactttctgtttctaagagtttgactactttagatacttcatataaatggaatcactttttgtgatttgcaactggctgattccacttagcacaaggtcctcaaggttcatccatgttgtagtttatgaaggaattttcttcttttttaaacgctaatcatccattacatgtgtataccacattttctttatccattcatccattctagtgtctttgtttttgacttatgggtttccggaaaagactgatgagaaaatatattttctattaacccaagagaaaaagtgatcttgcatgctggaatttttaaggatggtttaggttctagagactcaaagagaaatcgtagaaaatgcaaagggaaattagattaaaaaaaaaaacagtgaccacataaagaatatctcccattatatcctctctgagcacgagaaactattaaactactttcaaccgagcaataagggcccataataaaaagctgttgccctagtttttttactgccctactcaataccccctctttcataccctcaaaatagctcagctgagaaaagaaacagtccaattttacagaagggaaaaataaacagataaaaggataagcaagaactcttttcaacacagagtaaggtactggttagaattttaatactgtatggaggagtctaaccccagagtaatccctggcccattttggtgttagtaagtggatcccagtgttcgtttgtatcgaggtagtttgaagcacgttagggatattcatagcctttacttcagtgcattattatgaaagaatctaaagtatctttgcatttacgtgattatgttttcagttggtctgcggagctattattaaatatgtggccataacgtgtacagaaaaatctccaagtaaactggcatttaacttaccaacacgttaaacccccatacataacttcctttaaaaacgatcacactaaaaatcccagcatttaaaatcctgaagttttcggtaaaatacgctaaatatagcttgaaatagtaaataatccccccaaggcgacattagcaaattaattggtgtgtgaacaaagaactctttctgcagcagcatgaatgttgcctttattttttctcacaagtatgattttagaaaacagctgtagcgcatgttgacaaatgagaaagcggcagacgtggtaaagcactttcggtcaaggccaagagggggggaaatcgggttgctggggcggcactcgggctggaatccctagcttccctaacctcctttttccagtccggagtgagcgggggccccatcgccccacccccctttcctggctctggttacggccttgcgagttgaacaaacttgctgcaggcggattggcggctgggagctctcgggctggggcgttgtatttattaatttatattccgcggcgccccgcgcgggcggctcctttgtgtccagccgccgccaccggagctcccggggcctccgcggggagcgcgtcccccgcatccgcccgacccccggggctggcacgtgctgcgcccggtccgctgagggggcggaggccccgatctccccgaccccccttctctgcttagaggaggaggagcagcggcagcggcagcaggaggcgacagctgccagccgaggaggcgcggcggagaggggactgcggtcagctgcgtccacttggggctgtgcggcggtcccgcgcccggcgatgttcccgggcactccctgagtagcggcagcttatcccccgcccgctagcccgccctggtccccggctcgctcgctggctggcgcggccccggccccgctctgcgtcggccccgccgcggtggaggcgcgcgagggggacgcggccggggatgagcggattgcgggtgaactcgccgcccgggggccccgcgaagccgtgagccgctgcttttctccgagtcgccgccctgcccttggatttgagatcatgtacgtacgcgccgccgtcctgccattgtctctctccagcgcgtgccgtgcgccccagggacaggggctggtgcccatcctcgccgcgcgctgtcccccgcacttcctgttccgaggagagacccgcgcgctgaccgtgcttcccttctcccctcgccccctctgtccgtgcaggtccatccacatcgtggcgctggggaacgagggggacacattccaccaggacaaccggccgtcggggcttatccgcacttacctggggagaagccctctggtctccggggacgagagcagcttgttgctgaacgcggccagcacggtcgcgcgtccggtgttcaccgagtatcaggccagtgcgtttgggaatgtcaagctggtggtccacgactgtcccgtctgggtaaggaagagcagctgctccgcgctgaggctgaagaagcttttctttccttttttttccccctcccccttctgcccacttccgtgagtgtggagtgtccgcgttacatgggtcaaatttttaaacatttttgagaaaatctttggtcctttgtttcactgggcagggaacagccctgtcagagaacactcttaggaagatagaaggccccagtgggaatgtggagcacttactggtacacttcacgactgtggg

SEQ ID NO: 9 - DNA, 6000 bp, Homo sapiens
tggaagtctgattcaggaaggaggtaacaccacagagcagaggaatatgaaaggccttttaacaatttttattatttaacaaacattaccaaataactgcatcaagaatttacacttatggtttcatactacaccaataaactagcatttgtttcagcttttagtaaataggtttttttttttggaggagggggtgttgatttcaatgaaagaacaccaggttagaaagtaaataggtttaagcaaacatatctcttttcaacatgggattttggttttaaagaaaaaaaaaagataccatatatgttagtaactttattctaagaaatacacagtcatatgtcacttaatgacagacatacattctaagaaatgcatcattgtgcaaacttcatagagtgtccttacacaaacctagatggtgtagcctattacacacctaggctctacagtttatcgtattattcctatgctacaaacctgtacagcaagtgactgtactgaatagtgtaggcaattacttcctacacacaatggtaagtatttgtatatctaatgatatctaaacatagaaaaggcacagtaaaaatatggtattataagcttatacagttgtgtatgtggtccatcatccaccaaaaggtcattatgcagcacatgactaaaattagggcatttcttagtttttcacaatcaaaggaaagtaactaatgaccagaaattttcttgacaatttgaaattttcctggtaaagatgaaatattttatattaataggaagcaatatttcttaaaagcgttctttaaaattatgctaaccagaaatttagaagtttaggggacagtgttactgaaagaattctttgaccccctgacagctcttcttcaatatcaataacacaggaatgattgtggctcttgcattttatgggctgaattgtgtttcccgcaaattcacatgtcgaagccctatccctctatataactttttggagacagggcctttaaggaaatagttaaggttaaatgaggtcagaagggttggaccctaatccaataggactggtgtccttattagaagaggaagagaccaggggtgcacacagaaagagtaaaaggccgctgaagacacagtgagaaggtaacggtccgcaagccaggagagaggcctcagcagaaaccagcctccagaactgtgagaaaatacatttctacactataagccacccagtctatagctacactgtaattctgccatggcagcctgagcagactaacagaatgcactttttaaaaattacaattttcctctcttccttccctaaaaaaaaccctacagttgtgtaataaacactgaaatcttcatatactgagaacccacctgattgtttttcactaaatgtcaccattgctgtagccatatttgcaccctgtaaagatccatattatattttactacaaatagtttctgcacataaaagtttggttctttttaaattcctctaccttccttagttataatctctgtattagctggttcagcctgccacaacaaaataccatagactgggtagctgaaacaacagacatacttcctcacagttctggaggctaaagtctcagatcaaggcaggagccaattcagtttctgatgaggatgctcttcctggcttgcagatgactgccttcttgctgtgtcctcacatggcctttcctggtgcctgtgcatgaagagacagcaggctctctgatatctcttcccatcaggacactatttctttcagatcagggacccacccatacggcctcatttaaccttaattacttccctcaaggccctcctcttcaaatacagccacactgtacgttagggcttcaacatatgaactaggaggggacacagacagtaagtaacaatctccaaacgcaacaacctgctttcctcggctgtcatgtaataaaatgttaacactcccaaacaatagcaaaacagagacacaacaaaaatctgttaagtgtataaatattgacaataaaatgcttccttttaaaaaatggttcattcagccgggcgtggtggctcacacctgtaatcccagcactttgggaggccgaggcaggcagattacctgaggtcgggagttcgagatcagcctgaccaacatggtgaaaccccgtttctactaaaaatacaaaaaaaaaaaattagccgggcataatggcaggcgcctgtaatcccagctacaagggaggctgaggcaggagaatcgcttgaacctgggaggcggaggttgcagtgagccattgcactccagcctgggtgacagagtgagactccgtctcaaaaaaaaaaacaaggttcattctagtaacaagtaaatgccatgcaataccattcaagtactacatgggacttggtcagagaaaacccagttcaaactataggaatgattgtgaggagttggagagcctgaatggatgcctgggagactggcaggatgcaaggaaagccgagccctcagtcacctggaaactgccaggtaatctgggaacagactgggtgctactgggtgatcttccaggaaaataataattcaaatacagaacccaagtgagagatatgaaaacgcttcccttttgatttggctaacatatggccacacagtagtctcagctatgatctgtgctttcctacattcctcgaaaaatcgactgcagacgattccaccagcacatctaaaaaagataggtgtcttaaaagggagccacaaaatgaacattcccaattggaatctactcccaagccaacattctagaggaaaaaagattttttaggtttaatcaaaataatacaagtaagagcttctaaagtaaacgtagaagtattacagatctacttttggaattcttgtggttgctctaatctctccccttttattacaacctcaactgccagatgaaatcttcccagaactccattactgcactattaaaagtaatcatttacctaactagcatttgagcacctatctccataatcaaagcccaccatgtccaacctctttataccaaacacaacacttgccccacgttccaggctcatcctgctccctgcctgctgagctcttcttctgcctcctctcctctcgccaccccaagcatttccatggtttgtgtgtcacctccttcaggaagtcttctctgatgacatgacacgcagatttttccttcagtcaacaacttcacattaagaaactattatgttaatttgagagccccttcctctcaaatttttttggttcactgttgtctgtaacctatacttaatattgtcttcttactctcctattctactaatatgctacatcattattattatttgagacggagtctcgctgttgcccaagctggagtgcagttcaagcgattctcctgcctcagcctccctagtagctgggactacaggcgcgtgccaccacgcccagctaatttttgtatttttagtagagatggggtttcaccatgtcggccaggctggtcttaaacctctgacctcgggtgacccgcctgcctcagcctcccaaagttctgggattacatgcgtgagccaccttttcatatccgtgggaaaaagttcttaaatgttttatttcctaattggttctcgtgtgcgatcttaactgtagtaggtggttacctttaggaacccaaacttacccatcttttatgcccccattcacagcacatggcaaagggtgaaacacctcgatattaattggtgttaagtatgtttttcctttgtaaatctcatgaattatttatgcttttgtacctttcttgaaggaatacaaagtgagagagaagagcttaacacctgaaaaatgtttcagttgcctgacattgtctttagctacaattggttagacaaacgtttacagagttcctactacacgcagagacaggcataaatattctattatggtaaggccttgatcacggttgttatctccagcaccaatcattgtcttctgcacataattaacacccaatacgtatgtgtggagtgaaaaaaatgaatgcagtcggcctgcctgcaagcagctgatattttaatggtgtgagggtgagggagatataaaggatgaacaaataaataaatgaggaaggtcatatcagtgtgataaccgctgtggagaaaataaagcaggatcatgaataccaccaacagccaggcagttgttggcagacctggagactcccatcagctggcgaagctgcccagcgtagtggttagctgctaggagggcagccccgggggaggtgcacagccctgccgctcattcgctacgcggctctggacgaagggcttcacctctctggcctcgactttccaatcccctaaaacctacttcatgagggggagtctgaggagttggtactaaagtgcctgtcaacctggcgggcgctagggaaacgccggcagcgccgcgggtcgggaactcaccggcgcgaagggcacggagagcctcgggctccctctgccgatgtccgcgcttccctgcccagggtcgagcaaggctgagctgggcaaagttttgaccttgaatggaggtctgggggactagggaccggcgcccctctctgtctgctagggctggcggagacccggcaggccggcgagggtgcggggccgaggtgggcggcgcttcccgggcgcctccgtcagacgggaggcatcgagggctcggccagctgccccgggcgccctgcgcggcggctgggcacgggccggtcactgccccggcgccggcctctcggacgaggccgccgcgcagccacggcgagaggcaccctcactacccccgcgcccagccggctcccagccctaacggcagccggcggggagcgacgccgtcccacggcgcgaggccgcggcgggcgcgcgaggcgcggcgcggggcggggcggggcgggcacatgcgcacaggcggcgcagccggcacgcggcgctcgcgctccctccttaaatgagcctgggcgccccgcgcccgccacttcagtggatcccgcgccggggccgcgggcggagctgcctgccggtcccgcgccgcgcgtccgcactcctcggccctcgggcggtcgatgggacggggcgccgcggagcaggaggcggcgcccgtcggggtgctcgggccgcgcgggagcccactgtggggctcgggcatggcgggccgcaggacctgagctctcctcaggggagcggggaggcagctgctggccggcgatggggacggagtggggccgtcgccgccgcgccgagccgtgagcgccgagccaccgccgccgctacctcagcccttcgcgaagcgccgggcagctcgggaacatggccctggagcggctctgctcggtcctcaaaggtaaggaccggggctggggccacggacggcgccccctgcgggccgaggctggcgcgccgccctgcccgcgcctctgcgtcccttacccgcgcccgggacccgacgcgcctctttgtctggcggggctcgcggctactcggagcggaccgcggggcgcgagccctgcccggctccgccggctctccgggcgcgccgcttccgacccctgcgagtccggccgacgttcgcggggcgcgtgtgggaagagggatcgggtcgggaaggcggccaggaggcccctgggcccagcagggccctccgggctgcgccctcgcgccgcttccgtagaattccgcgcatccctttgcaaagttgtgagattcctgtcgtggagcggaggccgctctttctccagatgtgatggcaaaaagtaattccacgagaacaataaaagccgcggccgtgacgtcgtgcagtggttttcgaatagccccgcggcgcctgcacctcgcggcggggaacggggcctgctgggccagccgggtcccacctgctgcggccacggaggctgcggcaccactgcgggctccgggggcggcgcg

SEQ ID NO: 10 - DNA, 6000 bp, Homo sapiens
tttttgttttcttgagacaaggcatcttgctcttgcccaggctggagtgcagtggcagcgggatctctgctcactgcaacctccgcctcccaaggagctgggtggggctaaaggcaccaccaccacacttggctaattaaaacaattttttttgcagagatgaggtctcactatactgcccaggctggtctcaaactcctggcctcaaacgattctcccgcctcggcctcccaaagtgctgggattacaggctgttccactgtgcccaggaagcccaggagtccgagatgagcctgggcaacacagcgagactcccatctctatttttttttttaaagatggtatggtgttatgatacatattggttttcgtccacagctcctggctcatgactctcatagtccttgttagtcttttgttataatattgagtgtgttagccctcaggggcagtatctgaccttctcctgcactcctttcactctaaccttcctgggcctttctgactgtgggccttaagaccctcccataaagcttccatgaaaacccaagaggacagggttcagtgagcttccagatgcctgaacacctggaggttcctggagggtggagcacccagagagggcatggaagctccacacccctgccctcataccttaccctccgtgtctcttcatctgtatcctttgcgatatgctggctttttttttttttttttcaaatggaatcttgctctttcacccaggctggagtgcagtggcgccatctcggcccactgcaacctccacctctagggttcaagcgattctcattgccttagcctcccttgtagctgggattacagacacccaccaaccacacctggctaatttttttttttttagtagagacggtttcaccatgttggccaggctggtctcgaagtcctgacctcaagcgatgcacttgccttggcctcccaaagtgcttggattataggcatgagccaccacactaggcctgcaatatggtttctaataaaccagtaattgtcagtgtttccccgagttctgtgagctgctcccacaaatcaattggacccaaagagggggtcatgagaaccccaacttaaagcctgctggtcagaagttctggaggcccagacttgggactggtgcggggcagggaggcagtcttggggactaagccctcaacctatgaggtctgacactgtctctgggtagatggtgttagaactgaattaaaggacacccagctggtgtccactgctgggtggggaacaaaagccccatgtgtatggtcacagaaatctgtgtggatgattgctgtggtgtgagagtagaggaaatggttacagttttctctaaacaattggtgtcagtgaagtgggatttgcaggaatggccctgactcacataaacatgtggtttgggaagaaaaaggataaaagggtggaggaagaggtcgtcaattcctgggtgaccacgtggtcaccatggtgtgaagccacaactctgttgagatcagttactaaaggtaaaacttactagtggaatttagagatggatccaactcccaggaattggttcattgaatgcataaggaaatgcaaactaataagaaaaatgtgaaatattcagccccctgattattgttatctataatggctaaaatgaaagtaaaagagggtgctgggttaggaattgaggctggaccaagcacagatgtgggtctggctgagctcaggccactagcctcggagtcacccacaaaggaggaaattatgcagggacaacagaaagtacctctgagacctgtggttaccaagaaggtagtcaatgtgaaggaaccaagtaattatcgaaaccagacagtagagtgtggaggaattgttccatttcatagatcagtatcatcagcttcctgaggaacatttactaaaatggattctgagagtgactaatttaggggcagtatgcagagtggaagagcatgtttgggttgatgcaggactcacagttcaccattctagtcacagttgggtatatatgattcagacacacaggagattattcctgagggaacagccagcctggtggaatgtagaaaagtcactgtaaaggtcgggcatggtggctcacacctgtaatcccagcactttgggaggccgaggcgcgtggatcacctgaggtcaggagttcaagaccagccgggccaacatggtgaaaccctgtctctactaaaaatacaaaagttagccgggcgtggtggctcatgcctgtaatcccagctactcaagaggccaaggcaagagaatcacttgaacccgggaagtggaggttgcagtgagccaaaatcatgccagtgcactccagcctgggcaacagaaagagactctgtctcaaaaaaaaaattagctggcatggtggcatgtgcctgtggtcccagttactcaggaggctgaggtggaaggatcgcttgagcccaggattccaaggctgcataaaaagtctcagaggctgggtgcggtggcttacgcctgtaatcccaacatttggaagggatcacaaggtcaggagtttgagaccagcctggccaacatgatgaaaccccgtctctactaaaaatacaaaaattagcagggtatggtggagcgtgcctataatcccaggtacttgggaagctgaagcaggagaattgcttgaacctgggaggcagaggttgcactgagctgagatcaagccattgcactccagcctgggctacagagtgcgactacgtctcaaaaaaaaaaaaaaaaaaaaaaggctgggcgtggtggctcacgcctgtaatcccacagcactttgggaggccaaggcaggtggatcacatgaggtcgaccaacatggagaaaccccgtctctactaaaaatacaaaattagctgggcgtgatggtgcatgcctgtaatcctagctacttgggaggctgaggcaggagaatcgcttgaacccgggaggtggagcttgcggtgagttgagatcgagccattgcactccagcctgggcaacgagagcgaaactccatctaaaaaaaaaaaaaaaaaaagattgtaacttggctacttggctgagcatggtggctcatgcctgtaacccagcactttgggaggctgaggcaggtggattacctgagctcaggggttcgagaccagtccgggcaacatgacaaaacccctgtctctactgaaaatacaaaaaaattagccgggtgtggtggtgcacacctgtaatctcagctactagggaggctgagccaggagaatcgcttgaacctgagagaggcagaggttgtagtgagccgagatcatgccactgcactccaacctgggcaacagagtgagacttagtctcaaaaaaaaaaaaaaatcttaagtggcatttacagtgtttgtgattctagatcaggctacgtttcattccataaaataaatagaatgagtgttcagatgagtcaagcacaggttagtttttatggacaaaaaagggtagagaaaaatagaaacagaaggaaaaaaagcagatgggtcctttcaaagttacttttcttgtaaaaggacttccgtatcatgccggctcacactggcttgtttggggttttggctcttccttccctctcctgattcctctgaaggtttgataaacaacttagtgttgcttagtgacatagaactttagcgtgagtgactccattttggtttggtctgttgagccaagcacaggagctcagtgcaaatcaatggcctcctataaaatttatttaactgaacccttgtgcattgctggtgggaatttaaaatggtgcagctaccatggaaaatcgtatggcgattcctcagaacattaaacacaattaccatatgatccagcaattctacctctgggtgtatatccaaaataattgaaagcagggactcgaacagatatttgtacactcacattcaaagcagcaacattcacaatagccaaaaggtggaagcaacccaaatgtccatggagggatgaatggttatgcaaaatgtggtacatctatacaatggaatattattcagttgtaaaaaggaaggaaattctgacacatgctacgaaatggaaggatcttgaagatattatgttaagtgaaagaagccagacccaaaaagacaaatactgtataattccactcatatcaggtgcctagagtagtcaaggggaagttactgtttaatcgcgatagagtttcagtttgggaagataagaaagttctagaaaagaatggtggtggtggttacagaacaatgtgagtgtacttggtgccacagaactgtatgcagtacttacaaatggttacaatggtaaatttaggccaggagtggtggctcatgcctgtaatcccagcattttgggaggccaaggcaggaggattgattgaggccagtagtttaagaccatcttgggcaacacggtgagatccccatctctataaaaatacattttaaaaatttaaaaattagctgggcgtggtagcacacgcctgtagtcccagctactcgggagactgaagtgggaggatcacttaagccagaagttcaaggctacagtgagctatgatcgcgccactgcactccagcctgggcgacagagcgagacccttctaaaaaataaaaaggtaacatacatgtgtatgtattgtaacaccattaaaaaacagaaatttaaacgaagaaaagttggcttctagccctttgatctagcaaagctgacagtgtcctcacctaccaatataggtagatgactccttacacgtggacaagcacatccacctggccgcttctcccctttcctcccctcccccgttcctctcctccccaacacatccaggttccgaccctgccacccccaacgagtctcactgcgcaggcgcggagcggtgggcaggagcgggcgtggcctgactctgcgcctgtgcggaattccagctgcgactgctgagggagaaaatgatgcccaggttgggctccccggcccaccggccgaggagaggcctgcgctgcacacgcgcagaccgagcatccgcgtcaagaggcgaagagagcgcgcgctccccacgtcctgcgctcctggctgccgggcattcgtctcagccgtgactctcgccaggccggggctggcgcgcccacgtctgaagagcgatgccccgggagatcatcaccctgcagctgggccagtgcggcaaccagagtgagcaagcgagcgccggccccgccggtctctggttctgccccttcgggtcccacccaagtgcctggcttccaccagtccccctttcccttccatgaaccccctgccctgctgctctggataacccagaccgagagctgcgcctccagcccggggctggggcagctaccaaacccaggcatcttgggtccaccctctgatcgtgtcagcctctgagactaaaactgggctcctcaggccttaaggctccagcagacccgggcatctcccccctcccccagttgggttcgagttctggaaacagctgtgcgccgagcatggtatcagccccgagggcatcgtggaggaattcgccaccgagggcactgaccgcaaggacgtctttttctaccaggtgcccccagcgacttggccgggggcggcagtggcccaagggggcggaagggaagggagtggcctggtactgggaaccccgctgggcagtagggccaggcggctggcttgaggagggagggccggagggagccagagttgggaggacttcggacttgggccgccctagctgattgggccccctcctggactccccttgacaggcagacgatgagcactacatcccccgggccgtgctgctggacttggaaccccgggtgatccactccatcctcaactccccctatgccaagctctacaacccagagaacatctacctgtcggaacatggaggaggagctggcaaca

SEQ ID NO: 11 - DNA, 6000 bp, Homo sapiens
aagggtgttatggtcagataagaacagcaaacatggggttaaagaaaattgaatgggttacttatgacagaacttctcagagcctttaaaacaccattatttattgtgattttctaagaggggagatgattagcagtttccctaaacttacttcatcctaaaacccttttgtggtggaacatctgtggagcatattttgagagacaccatgtaatgcttcctctcttaaataagttcaagagttttttaaagatacactcatgggtaatggggctgacttttgtttaggaaatgttgggaggtttggcttatatttttggcccattgaagtcatcataatgggaggtaggtgccaggcctgactggaatgactatggggtgttccaagatggcaattcatctctttttaggaccactgctgtcttaaaaaccaattttgttttgttttcctattgttactttgaagtactttgactgcgcctggtttgacatacagaggaaaggtaagtctggtggcctctcttgatgaaatactgttgtgtcaaacccctatctactccaatggggatagcgccaggatcaagaggcagaagaagagacccagagccagcaaatgagacatggggtttggctgggggcttacatacaggagacagagtccagtgatggtgggctggacaagataactgcaaagtgcagtggtggccggctggacagaagaaccacaactgattgcaaaaggcatgcagtttacatatctttttcacttagcatcctttccctaataacctccacctggcaaccttcactcaacccaaaactcagggcctcaagctgctgtacagcccatgtttcacaggatggtctgggggctcagatgttcctgacagacaaggaacgaatctcctggttggccacttccagattccctagctcagaacacacattcaggtgcatttgtcatacaagttcattctcagggtatgctttagttattgctatcagatgcatttaccatacaaacacccagtctgaaaatgggcccaaatgtaataacatgtaataacataaatgtagaaacatattccagatgttcttgatcttttctgggacatgattcttttgggggccttatgggaaaaagttattgacccattgtggcatcaaatgcatattcataataaaacttgcataaaattttagggtgttcttgcaccctctgaagccaaccagtaaatcactgggctagatttactgtcctcaaagagagctctctgaaaacaaaacatatcatagacctatgtaacacaagaaacgatagtaagactctcagttgtcccctgagcagttattttttttctttcttttgaactcttggttcttggagggtggcctgttgcttgctagttcctgttttgatgttggctttgtcaattgcgctgaatgactgtcaatcatgttacttcaactgcggtacttggggacttcctggagctgttgtttacaaatgccagtcctagtttctctttctgaatgctgtcctcctagctttttggaaagaaaaaaaaaacagggcagaaggacaagacacatgcagagaaccatatggaaaaggaaggcagctgttggccgtggaatgaggtcctatggctctgtctgtgtcttgccaggagccgcaccacttctgtctgggccttggtttgctcatttgttatctgagcaagttgtcctcaccaggtcatctcctgggactttattcttttctctgaacttctacggggctagcttcatttttattataaacatttaataacaaaaagcaacatctttcttgggtttcccttgttcttctcttgccactacttttatttatttatttttgctcaaaataaatagaggttcgattagttccattaattaacttctacccagcatttgtctcttcagccatcccccttcctcagccctgccttacccctgcccttctctagccttctctgtttgtacttccttatagatttggctgtcttaatcacaacccaagatcattcatttcatttattttccagaatgaaaagttcctcatttctataccaggctttctgggccctacctccttgtctgggaagcaagccgacactgcagacatagaggggaggggggcataatggcagctatgtgcactcagggcagctggagaaaagaggattaattctgagacatgtgaagcctagcccaggatccagtgttccagaagaatgcgaataaagccccgagagatacaactggaggagcacttctctaccctgactcaacactattaaatgcagggcgtggcagttataataaatgctgaaaagcatcgggtggaatggtctgtgtttgcaaaagtctaatgaactggagtttgcaaaggcttagaacttaggccaagtataggagatgtggtaaaatttgtgttttggcgggggatatggtgcgggaaagatttcttgctggagttcctcaatgttaattgagctttttttctaaatctctaaggtggtaggagtgatttgagggggggaaaccccataaaagacaaatgtactaagaaaacctttcgaaacctgaattgaggaaataaaatcttagtagtctttcaatttttcttggtacataccacagtaaaatattgcatctattttttgaactatgcttcacattactctgtgcttgctttttaccccaggaaagacatgcaagaaatgccccttgaagggtttctaaacgttgtacaatgcttactaccctttccctcttccccactttcaggcccctgagatggattcatctgataccaggagcctctaggacccagaaatttaactgtcaatcaagaggcatgtgagggaaagtccagcccagcctgggtgccagaaggtctggattcctggtctgcacattccctacaactctgggcagagatctcatatgtacttctggctcagctactaacttagctgtgtggctttaggtgacccacttaacttctctgaatctgtttctccatttgtaaaataaaaggtttggactagggaatccccaaatttcctttcagtataaaagttccatgattaccagtgacctgctcaaggttcattatttccctcatgtttaaagcacagaatcttgtccacttcatagggaggtggtgaaagtctatgcacatgtgctcagtaaatcttaggccaacacaaatgtcagctatcatcattattataagaattctttatgcagctctttcttcagaacatgttttatatcttttaccatttgtgctaaagtgcaatttttgccttagagaaattctcaaaattcaggctttggtttgacaaaaggagacaaggcgtcagttcaggtagatgaagttgctgcaaatgacagcagcatctaaaatttcttaggaaggaagtgggctaagacctacccttagcccccagaaagacaaattctcctcaatttcatttaggggcatgaccatttcttattaagaaacagaactctcaaatgaggctttaccctaagaatgaaaaggccttggagagttccaaaggcattaatagtaaatctaggtgcttatcttttgccttcaactgtgctttttcaagtactttacccaaattaattaattagtgctcctaaacccacaccagccatcactttgcctttgggatggagggaggtgatattatctgagctttgcattaggagaaagcccctgggttgacagtccctctgtccatacccggtggaatcctctcctgccaacagtggcaaactcctttgtttgtttgttttgaggtggagtctgtctctgtcacccaggctggagtgcagtggcgggatctcagctcactgcaaccttcgcctcctaggttcaagagattctcctgcctcagtctcctgaatagctgggactacaggcatgcaccaccacgcccagctaatttttttgtatttttagtagagatggggtttcaccatgttggtcaggctggtctcaaactcctggcctcaagtgatccgcccaccttggcctcctaaagtgctgggattacaggcatgagctaccacacccggccagcaaactttcttatctcttgttctccattcccaggactcccatggtaccaactcagtaccttgctcagcatcccagggtgttagaactgaatggctgcttatggactccctgcaatgggcacctccttcttttacagcacagaaaattgaagcattcaattcactcagggagaggaagtgaaacacccaaagcaacacagctagttagggacagggtcactaccttgtcttaagaggcgaaaaataggaactatctcccaccctctcccctgacaaaaccaaacactctttgcgcccctccaagtatctcaatactgcttaagcctgaggagtacggggaagatgaagtatgtaacgtttatctactcacaaagcacagagtttctgttgccacctctgagcagctgtcttgttctgggcaactgtgatctcccttcctctcctaagctcttggaatgaatctttcttaagggaaatggaagttgcaattccattattctgtatagagtgagttaaggggaaggcctctctccttttctgtcatctaatagctaaattaacataagcccataggcacagggattcaggtaacagaaacctagtttgtgacaattacaacgtgaaatgaaaacatacattgtggcccagaagcccgggcagccctaggcttcagatattacctaccctaaagtagtataatgccttttaccaagaacacagctgaatcaactgtgcttttcatagaacaggcacacactaaaatatttgtggattgatttggtaggcaaaaattcttggcacttggatacttctccattttcagcttattcttaaaaaaattttttttgttaaatgttcagctgcaaaggcacaggtgactaagtgttcaacacagctggaaggaatgttggtgacagtggctgtcatctatatttcccaagttggtttctaaataacactgcttctggggtatcttgagaaaaaaaggttctgtgtttaaacaaggtaggaaacattactaatcttcctaccttggtctcccaagacactaaaggcacatagcttattaaaaacactgagaaggctgggcacggtggctcatgcctgtaaccccagcactttgggaggccgaggagggcagatcacttgagatcaggggttcgagaccagcctggccaacatggtgaaacctcaactctactacaaatataaatattagccaggcgtggtggcaggcgcctataatcccagttactggggaggctgaggcaggagaatcacttgaatccaggaggcacaggttgcagtgagtcaaaatagtgccattacactccaaactgggcgacaagagcaaaacttcatctcaaaaaacaaacaaacaaacaaaaaaccactgagaagagttgtgggtaaagaaacagttttatttttgtttaaacgagttatttccaagaccatttgaccatggaacaatccctcccacatttttttttgcatgatatctattaaagttccacaaaattcatgttctttggaaaataacttgggaattactgattgagcccaatttctgaattttattggtaaagaaaaaggtcctgagaggggctgaagttcttacaggaagttagtgggggaggtaggacgacaaccctatttcctgagtgtctggcccaaccttgtcaaccacacgcaaatacggcagcattctcaaaggtgggttctgggatcccagccatcatgggtactgcttgagatgatacgcaaaaaggacatgaacgttttcctccctaatgggtcctttgggggcaatttgctaaaacataacaggttgttttagatgcttcttaaaattggtaatcatatcccattctt

SEQ ID NO: 12 - DNA, 6000 bp, Homo sapiens
aatccaagcatgtgaatcccagtagttaaacatgactggttgacccaggccttgcaggagcccagaggcaaggagggaatgtgggtgagccgcaggagcttaagctagtcaaagtcaagttcagaggccagtggacctgcacaaacttgaaaaaggctcaacacctgttgtaaatatttgcttgctactgagtcctactcaagccatctccatatcaccatgaatgaagtcagacttttagggaaaagtggttaacaatctggatttctgcggtagcagggtggatcatataatgcttactcctgacaccacgcctgacacctattcagtttctcagctttactcaaagcctccatgacttagcaggttcaggttaggcgaccttcttaggtaatcctaataacagctggccttcccttctctcagcactttttccccgtgttattgtctgattatttgtctatgtccacgtcctttgctgttgtactcccagagcccaataggcagggggcccaggacacagcagacatccagtatattggatgactcccatgggttagtggttatggctgaacataacatgagaggccttctctctcagaagaatgtgatgaaatatgcaattgatgaacatccagaatccagatattcacctgtcttgaaaattgcacttccaatccacactctcagtgcctgtgacagtataaactagctcgagcattgcagaaaacaatcaacaacatgtcacaagaaccttaaaaagttcaaatgacttgaaccaaaaatgacctctgaaaacaggtcctaaggaaataaatacaaatgtagaggaaggatgtcactgtactgttatagaagaaaacaatttaaatgttctcagtaaaggagtatgtaaataaaggaatagtcctttgattgcaaattgtgtaggcataggagaaaaatatcacattttggaaaaagatttaatgacttggaaaaagttttatctgataatgttaggtggaaaaagcaggatataagattatgtattctataggatccattgtaaaactctctctcacacacacacacacactcctttacaaacatataagagagaaaatattggtaaaaatgttacctgtttatcgtaatctttgaatgattgtttgatattttatcctgcattttccaagcctccattagtaagtataaaaaataagttaagggccgggcgaggtggctcacgtctgtaatcccagcactttgggaggccgaggtgggtggatcacgaggtcaggagatcgagaccatcctggctaacacggtgaaaccccgtctctactaaaaacacaaaaaaattagctgggtgtggtggcgggcgcctgtagtcccagctactcgggaggctgaggcaggagaatggcatgaacccaagaggcagagcttgcagtgagccgagatcttgccgctgcactccagcctgggtgacagagcgagacttcgtctcaaaaaaaaaagaaaaaaaagtgaaggtaaaaacaaattcccaattattatttctatgtttcttctgttttttgttttgttttgtttttgagacggagtcttgctctgtcacccgggctggagtgcagtggcatgaccccggctcactgcaacctctgccacctgggttcaagcgattctcctgcctcagcctcacgtgcagctgggactacaggcaagagccaccacgcccagctaatttttgtatttttagcagagacagggttttgccatgttgaccaggctggtcttgaactcctgacctcaagagatccacctgtcttggcctcccaaagtgctgggattacaggcatgagccaccaggcctggcctatgtttcctttttttgcaaacaccagatcagtagcgtggcacgtaaggccgaggcgggaaaaggcacatccatgttcttctccttagcatagctcatgctatggccatcaccagacaccagaggacatctgggttgcctcctcccaagtaggcaattattcatattaaagcgggaaagatatggtgcagccaaataggcagagcagaaggtatgtgctgctactgcatataacaccactgctactttttaaagcaaatcccaccttcttctttggcttgctcaagcctgttccacagtgaacaggagtcatggagctgtggtgatgtttattctcttctcttaaagccaacagccaatactgaattgtaactctctttgtttcttgttgtgttcttttctcttcctttttgcctaactctgaatttacctcacaaggccactgtgaagagaatgaaactgaaatatgtagaacattctcggcctctctgaggatgggtggaatcagaacagagtaattaccccttgtgctgtcttgtatgcctgtcatccaacaacacatgatgttcattctctccattcttttcttgcaatactgatgaaataaaatttgtctataaagattcctagctgagtactcaaatgtttttcttgaacatttgttacatggtctactttgcaagcttggtttcaaatttgttgataccaggattaataacagtatgtcttgtgccagtatattttattttcattgagttctgaaaattgacttcagagaacagcatttttaaaataacatttttatttatatcaataaaaatacccatgaattcatatgactaaaatattaaaacctagaacccaatttgtttacctaaccaatcacttgcaattacctttaggtaattgtattggtttggtttcaagtattttttaactagggctgattttaagaagtgttttcatttaagctgtaattatagtcgatagaacttccacctaatatgtgactttttttaatttttaatttttttgagatgaagcctcactctgtcacccaggctggagtgcagtggcacaatcttggctcactgcaacctccgcctcttgggttcaagtgattctctcgcctcagccacctgagtagctgagactacaggcgtgtgccaccacgcccagctaatttttgtatttttagcagaggtggggttttaccatgttggccagactggtctcgaacttctggccacaagtgatccgcctgcctcggcctcccaaggtgctgggattacaggcgtgagcccccgcacccagcctcctatgtaacattataaatttattgtcattacttgtaagcctgccctttattttaaaatacaagatatgacaagatcagaaaccagtcttgtttctccatttctttctctagaaataattctttaggaattcaaatccatagtaacaaaaacaaaggaaaaaaaaacatgcttttttttatataatgaataaaggttaagaaatgactccaggtctcttatttattttgttgatatttgtgttggttagttaagaagatgatttgctcgattatttcaacatttatttattcaacaaactgtggactttggagatgaacagctgaagctagaatcctgactatcccttaatagctgtgtaactttgggcaagttatttaacctccctatacctctgtttcctaatctgtaaaatgaagataatattagtatctaactcatagggttgttgggagggttaactaagcaaatatacaaaaagctgagaatagtccctggtatatagtaagtgctcaataaattatggatgggaggatcctgacccacatggagtttacagtcttggcagtatggatcgggcaggtagaaaaagacaccaaattacacagccaacagcatctttataattgtttttaatataggaaaagtatagggtgctaaagatcaatttgtggctttcttttccaatgaactgctaaagttccacttttatgcccaagattcttatcatacttttgtaagatcaagaacaacatgtgaagtttccactattatatatccacccattatatgtagttgtactggaaaaaattaaaagctgataacttttaatttgaagatgatggtatatactatgtatatatattaaggtgcttaaagataaatcctagcacctgaggaggtgtagaaatcattcaaactctttgattacaatgacaaactagtcagtaacttactaaatattgtactatatattactaagtattttactcttcaacatagctttttaaagacacaaagcttttcaaaattcctgcttacctgggggtaaaatttggggaagcagatttctccagtgtttaaagaagccaatttggcagtgtaccagagttgaatacatttttcccatcacaagggaatacatttttcccatctaagttaagttgtttttctctggtaaaggaggaaatcaacacccatctgtacggagataaacgtttcagagtgtttttatattaaataattagtatactagtctagtaagtgataatccacgaataagttaagaagagctaagaaagaaaaagaaaagcatccatccatcctttggttgcaaataatacttacattagcgtatggcaaaatttaattttgtacagagtaatttaacccaggattgctgactttttaagagctgagaaagcatagctatggagcgcaaggccccacccagcagggtctaagtattccgtctgcaaaactggcaggccaccaacggccgcgtcccagggcggcctgaaggatgctgataaccgggagccccgccctgggttcggctatcccgggcaccccgggccggcggggcgaggctctccaattgctgggccagagcgggacccttcctttccgcaccctcctgggtatctccggtcttcaggcctccttcggagagccctgctccgagcccattgggcttccaatcttggcctgcctagcgccgagcagccaatcagaaggcagtcctcccgagggggcgggacgagggggtggtgctgattggctgagcctgaagtcgccacggactcggggcaacaggcagatttgcctgctgagggtggagacccacgagccgaggcctcctgcagtgttctgcacagcaaaccgcacgctatggctgacagccgggatcccgccagcgaccagatgcagcactggaaggagcagcgggccgcgcaggtacactctgtgctccccgagcgggcccgaaggtccgtttagaaagcgggggcgtcggcaagtaaaggcccggcttcccccggggcggcgcttggagggactgtaccgcggctcactgggcaggggggatccccttcggtgcagacggacttttacattcgccgaagcaggggaggggggtccgggtagtggggcgcgggactgcaggctttgttgtccgcgacaggctcgggtggttgcttcagaattttgcacttttgccaactgggacagaggtcgcagcttgaggacagattgagggctcatggggaaagaggcagagagctgcagctgcaaggaagtcagtgaggggagaagtggaaccaggctctaatggtgcccttcttgaaatactgtttacacgctttcatagttgtggggtcccagcagggcagggattgtgttttacaatcttgaggtctccagcaccagtcacagtgactggtacgtactatgcacattattaaacgactaaataaaagaacttttacattcattgtctcatttgcacttcaaaatgtcaagcctagcattttagagctggggggtgacattagggattgattaatgcgtttattctattctttgagcacctgtaggtgctaggcactgttcggggcaaggtgtacaaattccagtgcggcaagaacaacacccttgagaagctgagagtctagtctgggagacgagacacataaacagatgattacactccagcgtggtgagggctctaatagaggttatctgtagaatgtagagggagtgaccaggtgggccggacaaagcaggtgacatttgaacaggaatttttttaaatgagtaggattt

SEQ ID NO: 13 - DNA, 6000 bp, Homo sapiens
caaggaaactgaggcacagagggaagggctagaaaatagcaaagatattacttaaaattaagcaatctgactaaagaaacagcaccatgccatgctggctttcacaaatatgaagctgaactgtcaactccaaaagggcagggtccctatgtgatttgtgggttactgtaaagcactgtatcgtgttgtttaacagtacttttttttttttgagacgaagtttagctcttgttgtccaggctggagcgcaatggcatgatctcggctcactgcaacctccacctcctgcgttcaagtaattctcctgcctcggcttcccgagtagtaggaatcagaggtgcccaccaccatgcccggctaatttttgtgtttttagtagagatgaggtttcaccatgttggtcaggctggtcttgaactcctgacctcaggtgatccacccaactcggcctcccaaagtgctgggattacaggcatgagccaccgcgcccagccctgtttaacagtatttaacatcagtgcttgcctaagccacaggccatgcaaacatctggccagggagaatcatcataggagctcttcaacatgtttacactactgagatttaccaattattttctaatattaaaagctattttacttatagtctcatttacataagcttattatatataagctcatttataaagcaaataggtacacgtatttgagaataaaactgactgggcacagtggctcacgcctgtaatcccaacactttgggaggctgaagcaggtggatcacctgaggtcaggagttcaagacagcccggccaacatggtgaaaccccatccctactaaaaatacaaaaattagctggatgtggtggcgcacacctgttgtcccagctagttgggaggctgtagcaagaaaatcacttgaacctgggaggcagagattgcagtgagctgagattgagccactgcactccagcctggctgacagagcaagactccatctttaaaaaaaaaaaaaaaaaaaaaaatgccgagtgcggtggctcaggcctataatcccagcactttgggaggccgaggcagccagatcacgaggtcaggagatcaagaccatcctggctaagacagtaaaaccccatctctactaaaaataaaaaaaattagccaggcgtggtggtgggcgcctgtagtcccagctacttggaggctgaggcaggagaatagcgtgaacccgggaggcagaccttgaagtgagctgagatcacgccactgcactccagcctgggtgacagagcgagactctgtctcaaaagaaaaacaaaacaaaaaaaattatatctgtaaatatcctaaagttgagacttatctgactttcctactgtttcctcagcctcaaattattcaaagttaatgaggcgctacattaataattttcaggttattgaggctctgtgaataccaaaaacagaaatataatccagaaaaccacactaaaaacccaacaggcaaaaatatggggtccagttagtagtactgaaaacacacaattcttactgtatttctatagttccttcatccaacaaatgtttatcaagcacttctgctatatcaggcactgttccatgagctggggtgaacaaatgggccaagtccctgttttcatgaaactgcattctaatggaacaattaacaattgtcaggtggaagtaagtgttatgcagaaaaatgaagggaggtcagggcatagggttactgtcaggctattttagaaaggctggtgagggctgaacactcataacgtgacttctgagcagactcgaattaaaaaatgagaacttcactaaatcctatgattcttcaacgttttcaagtttgcatccaaaagactgaaacacagtaacttcttccctttattctataaatagggaaactacctgaacagcttctagaaagtggagggggggccacggtagttcaatcgtggggaagaaaatgttgaggaattagatgataaagcctgtttgcaacagtgaatttttaatcgtcaaaactgaaggatctcaaagaattttaatatgtacttcccccaccctgctaccgtcagaaggaaaagttgtcatcataactgttttctaaagacagagatgaaaggaactgctcaatttcacaacttgtaattattagagggaaaagtacttaatgttgaaaatattaagtgaacattgagaaggaatatgagacaaagatcagcacatcattttggctaggagagaaaaagagctaaagggaaagaatggtgcctaagctaattcattcattttatgtgtttctttatgataaagtttaagaaatttttttctaaaatactttaccttcctgaaaccaccagagttccatcatcgagtaaataatccttcacattctgaggaagtggaagaatgacactaaaaaaaaaacaccaaaaaaggcatcattttaaaagaccaactataagcagagagaaaaatctctacacttgattaattttggaattgtctttcttttaatataaagtagaaaatgttaatgatgtacatttggtagcagtagacaagaaatcagaataataagattactgcggttcatcttattgccacaatggtctttgtagtaaacaaaaaccagccaaatccaaaccaccagatggaaatcacagtatgaaagcaacaagctcaaaaggattctgagtgagcacaacatttatgtgtctttaagaaatcagagaccagcagatatttgctgcaacacaggaaatgcagcaaacccaactagaagatgactagcatttggtcaccttctaaagatagagggcagaagtagagtcaagatctggaaaccattcttgggttggcagtgagcacctaccgctaagaattcatgatacttttggatgtgtcttgctggctttctattcaactgatcaccagagatataaagctgcttaaactaggcatgctttagcttaatttgtttcaggtaatcataattaaggatggcaaagccatacctgaagtctcttaaaaacttatgggataatttgttttttaccttgaaataataaattatcaaaaagccctaccacagatccctaagagtgctggtattattttgattttgaggcatatacatcttcaaaaagtggaaaagattacagcctgctttcccgaagttaacagaacatcaatgacttataacatgtctcatttatttatggaagaagttttttttggcacattacaaatggtttttttgcacaaaaaagagtattcatgggctacttcggttttaaaaataagtatttttatttatttttaaataaataaaagatcactgccactgcactccagcttgggcgacagagcaaaaacttcggttttaaaaataaatatttgatttatcaaaggtacaatttcacattcaaaaatctagttctggccgggcgcggtggctcacacctgtaatcccagcactttgggaggccgaggcgggcggatcacgaggtcaggcaatcgagaccatcctggctaacacggtgaaaaccccgcctctactaaaaatacaaaaaattagccgggggtggtggcgggcgcctgtagtcccagctactcaggaagctgaggcaggagaatggcgtgaactcgggaagggaagcttgcagtgagccaagatcgctgccactgcactccagcttgggcgacagaacaaaactctgtctcaaaaaaaaaaaatctagttcttcaggcttttaatttcttctaacaaatcttattacgtttgaaaatctactaaattttaaacaatttcaagcgaaactttgcaacttaaaagtctctttaaaattttaaattctattcataaaccactcaattttctttcttaatatgtctatttgctgattacaaataagccttcctaagtattttactcttacaaagctaacaagcgaaattgttaagtacaatgaatctaaggttctaccacacattccaatactatttaagaacttgaaacttttcttatacattttaaccattctaagccagttacacattttcaagtacatatccgatctttattgaatgaaaccatcatataatgaatcagcaattactgaaatgttggctcagaaaatcagttaagtgcaaagcccagattttctatcaacgcctttaaaaaaactgagagatgaaattgtatatattaatacttgccgcctacctgatgtttttaagtatatatacactgtggaataaatttagctaacaaatgcattgcctaacatagttatttttgtggtgagaacactaacatccactctccgtttttcaagaatacgtatatcgtcattaactatagcctccatgctgtacgacatatctgtgaacttgttctcgtatctaactgtaattacgtatcctttcaccttcccaatctccatcctctggggtgatggcgaaaagcaattaattctccgagtgcacttaggcagtgatcaccttgcgcctggggccattctaaaagtagtggtggtgaactcccaagcctaaactaggttaatccactattcctcccgcctccgaccctcactgaaaaccacaactgaccctcctagccagcacactcgctggctcgcaacaggacgcagacaattgctgatgtacttccctctcgacacactccctcccatgcagtcgctagaaggcctgcatttttttggatagcagtaagattcgctcagaagtcgcagttcccttttgccggtcgaccgggcgaaccccctcccatctcacctcttgatggtaacgcctcggaagaacgggtaccacgcggagaactggcagtgaagcacatgctccttcttcatcctccagctgccgccgctgctgcctttccctctcctgcctgcaccctcccggaactctgggcgccggccccggaagtgcccgccgagctattttggttcaaggactcttccggtccctaaagcaagaaggaagaccgagaaaaggaagcggaggagaatcccggggcatacgcttgacacacacgcatacaaaaagagctttagtctcgaaagaggaattaccgaagtgtcgagagaggaattttaagaagtttacaactccgtcttcgccctaaacgcacgctgacccggaaagtaatctcctgaagctaggtcaaaggcgggggttctacggatgccggaaggagggtgcgcgcccatccttttagcaccgcgagaggcgccggtgtttcgagccgtggcaccggcatcggctgacactgctgcctccagctagttatttcgtcctcttccgttcttcacccctacaccttggagtaagtaaccggggcaagccagtcacagcacaaaacctctttggggaggagaagaagaaggggaaagggaccacatctgcatggtgcgtgcagccgcgcggtgtctcccaggctgcggctgggcacgcgtccaggcgcccaagagggaaactggggattggagggaaattgtggattggagaggaagagcctgggctactccgagtaaagaaagcggggaacaccacagctaagtgttagttccagtgtaaagattgcagcatctgcagaggagtagaatgcttggtagagggaataccgcctgtacgatcctggagggttcgactttgggaggtaaaaggcgagaggtaaatgtgagaaagcagaggaaagaggagtctccttggagcgctgaattcgtttagtctggcctcgcaaaagttgtcaacctggaaaaaacgcagatttttatcagtattcctgcgatgatcgaatcataagactggaagaattcgaatcgaacttgtactatcgttttttcctttgcttcactcctgtcacccagcaaagttcagttttgtttgtttcgttaaaagaatgagaagtaactagctgcttttatttatttatttgagacggagtctca

SEQ ID NO: 14 - DNA, 6000 bp, Homo sapiens
cctagtatcccagaatgtaactgtatttggagatagggcgtttaaagagatgattaagttaaaatgaggccattaaggtgggccctaatccaacctggtgtccctgtaaggggagtaaatttagacacaaagagaggagctaagggtgtggacccacagaaggacagctatgtgaggcggcagcaagaggccagccatctctaagtgaaggagagaggcctcagaaggaaccaaacctgccaacaccttggtcttggatttttgacctccaggactgtgagaaaatgaatttcagttgtttaagtcacccagtctgtggtattttattatggaagccctagcaaactaacacaatgactgagagttttccagaactaaagaaagacagcagtatatggatttaagaaaacccatacccaaaaacttgacactgataccatatttggaaaaacatgggttttccttatggtatcctgtactcctgttttatgtttctaaatggaaagcttcctgggcgatgcatctgattggtggagcccaggtcacatgcccattctcagctgtaagctgggaaagcaagtgttctaggacagacttacttataatatgtgaaatatccacatgtaaggagaatttttaaaagatgttggacacacactaacataacatatgcctataacagggctattcaaaacttatgttctagtctcagctgttttctctgtattcttttccttcaagagtgcataactcgtagagtctctaactcaatggatgacttatgtaatttgattaattcatttatcaattcatgaaactctagacacgagactattctggctatcatgcaattcccatgaactgctccaccttcacttcatattcagcttacctaaatcctagcgtcacccctccgccctctccagatacgctgaagaagtaggcttccttttttctgcaggtgttatcttgcctcttcaagacacctttgagagtcccctctctttcctcttgatttcacttcatacctaggttcagcagaatcgccctgccctgtaacgctctcactcatcccttcctttccagtcccataacgattacctttttgcagctttatgtttgagcatcttcaccatggccagtcactggtgtttctgactctggttgctcgtcccttcaattaattccgcaaactcatcaatgtttggtgaatttctattttcttctactaatcttctcacctgctgccccagccagtgttcccttgaatgtctcagtctttctctcggactttgctcgtaattttattctaccagggaccaccctgctcccatttttgtctaagtcttaacctcccttcatagtgcagctcaggccaatgccctcttgaagacacccccggatggttcactttgtaaatgtgtggaccttggcatggccaacgccccttcacacctggcacagctacttttcattgttttccttcatgaaaactaaagttcttttgttccacaaaactgtgacagtgacttcaggataaagatcatatctggatccctaattcttagtgcagagcctagtacagaactggaatgcagtgtttgttgaatgaaggaatgaattaaactgcaaattaacgaatgcctgctctggcactgagactcgcagctgtgagaaaggtctctggaggcagacagttgctggtacgaagtcctgagtcaagcaggaaacaaaatgcggatgtcagcagtttcaagtgagacctgtggtgagctccttcctctgccggttttcccttcttaattttcagtctgaagtgagggagtggagaatctttctgtgttagactgtgtcgcgttgggcagatttctccaatcttaggatagtagtggtccctctcactggccttcactttgtaccatccccagcaagaacactgagtctgtgaaccgaattctagtagtcgggaaatggattgaaaggacatccaggttttacttagtttctatgctcagatgctggcagaagccctgcaaatcttttccttttctgtgaaaggaagaggcggtttctgcgtgaggccctatagctcaggggttagagcactggtcttgtaaaccaggggtcgcgagttcaaatctcgctggggccttgcgaaactactttcttgattcaggtgttttttgaaaaactccccttctagtctttctgaactaagtcacagaaaatgtggcaaattagagcttctttcctctgttcagagcttccaaacactagctcagcagaacgtttcctttaggttccagtagtaatgctgctttagctcctggaatgcggcggaatccattacacaggcggtggaaatcaccgtcagcctctgcccacgccctggcttgcggactggcggcgagagccctgctgactgccgggcgggaaatggggacagctaggcgagacaatagccctttaagctattctcaagccccgggtctgggcatatttggagtagagatcaaggttccacttctgaaacgggaagagccagcaatggccgctccggccaggcgtccagaagagagatgcacgttgtgaggcaaggtttcatgtgccagtggggttttgggaaattaagggcccgactttaggggcgagacttgggtcactaaatttgattttaacgcagagaaatgtggccttccttttgaatgagctgcaaatattatctccaaaagcgaattcacacagaaacattgggtttgcccagatgtcctctatttcaggggttcccaacccttgggccgcgcacctgtccatggcctgttagggacccggctgtacagcaggaggtgaactccgggctagctaccagtaccgcctgagctccgcctcctgtgagatcagtggtggcattagaatctcacaggagcgcgaaccctattgggaactgcgcatgccagggatctaaactgcactccttatgagaatctaagtgatgcctgatgatctgaggtggaacagtttcatcccgaaaccatcccccaactcttccccccgcccccgcggtccgtggaaaaactgtcttccacgaaaccggtccctagtgccaaaaatgttggggaccactgctccattccacaccctctccctcccgtgtctgtggacgtgtaagcggaagagccgagattgggagggaagcgcaggaagtgaggacatcagggagcccgggcctaagcctggaggcccgccctctccggcgttcacagttgcgcagtcagaattgtgtgcgtcccaccgcctcagcccccagttctccgacgcccaggtgccggtccccaccctacacacaaacacacgcatccacgctcgcgaggcccctgggtccgcgcccagtgaggccaacagccctcgggcgcccagaggatgagcagcctcggtatgcccgagtttcaggggcgcctgctctgcttgggagcccctcagtgaggcaggggaatccagatttagaaaggttgtcctcagaacctcggacgcaggactgtcttacaagctggctttgtgactctgcagtaattactttccgggtataaagagatttctttctttcccgtctctggttaaggatgtctcgagtagggatttttaggagagttgtttccgtgcttccttcgatagctcagctggtagagcggaggactgtagtacttaatgtgtggtcatccttaggtcgctggttcgattccggctcgaaggagacgctgctgttttggggtttacggttgctcttcgtttgtgcaaaaaatctctgtatcttgacgtgatcaaatctgtttctgtctctcacccttgtccgaaggaaacagcttagccgcgaggtgggctgcgttaatcgcgtcttgaaaagttggttacctttctgaaagatagtagacccgaatcgtcccaccgttgggggaaggcactgttgtcttaccgaagtgtgttatattttggcttctacgttaagtccaaaggccggcagatatatacgtatcgcgcgtctgtcctggggctcagtaccctacagccttgcaaccgagctcagctctggccctcgatctctatttcagccccctccaggttccctccaggccctagcgggcttaaatcgctccccgggctcagtgagacacaagcatgtgacctaaagtctaaaaagctgccttccttcaccccatcctgcatctggatcgaggagaataagccagagaataagccacacttgaaacttggtgaagatggaaggaataactaaataaggcctaagggaaatgtcacaacagaggaaaagaaacaaaacaaaaaaccttcagaacagcaggcggaaaagagaaattcagagtgataggaagcaccactcagctacagtggctcgttggtctaggggtatgattctcgctttgggtgcgagaggtcccgggttcaaatcccggacgagccctcgtggctactgtttttccacccccttttgtcaactactgaaaaaaagtctccgttaaatttgaaacacaaactgtctcgcgatgggctgtcctgccaaagaaagcagcagcgaataagtacgtggcagatggtgctgtcgaccagtgtcaagaccaagtttcatgggttcctggacgctcagccaggggtagtctctgaagggccgcctggcaattgggagcagaagccagtttcccgccatctgctctccgtggaggcagtgctctcgcggctgctgcccgttggggtccagctgaggaaggagcgcggatcccaggctcgttctttgcctgggctgcccctgcggcccctggggcgggtgctgctgcggcgccagctccaagggcggatccaggcgggaggggcctcctcggagaagcggggcgcggtcccaactacgcagaggctggcacgccgaccctccacacctcaccacgcccccatctccgtccgtgtacacacactcacacaaggacgccaaccccacctagatgcaaagcaggattcaaaagaacatctttgcgttttctaccggctccccatcatcgtactagggaggaagaagcgggtgagaaacaaaacttctttccattgtcctgcccgtttctgcggacttgttctgaggccgaggtaggttcacactcctgctcctcctcctcctctctggtagcttcataaggggcgtttaggccggggagtcctttcctagtagaggcagcttgggactccttggggaggagtttgcgggacggggctggagagggaggaatggggagggacgtgaaagtcccgtatttgtatgagttaacgactttacattcccactcaggtttactttgcgcagctgggcacagatgccagcttctattgattagtaggcttggagggggaccacagaatcgccgaacctaagggaagccctaggaggcctgcacttgcccacaactaagaaagctttgctagttattcaggctaatcaccagctttttgaagcaggccttagttttttgcaagcgtaactaacatttggggatcggtgttttctgtttactctcctctgcctcctcacccttaacccaccctcagccagtgttgtgcaattcttagagacacttgccaacagcctcttctctaagccttcctactggaaggttgggatcctccgttttctcgctctgagacagcacgtcaaatgctaatagcagcacatgagtaaagcgcaacatctttattaaaacaatttcagcaccactcagggggctagggaaatctcagatgagccaagaccctccctcgtgacagtaaaaatcttataatcaagtcataatgtaatcagtagaaacccaagggacatcattatctgtggcacaggaccaccttcccagaagcagcctcaggtattcaagacttacttaaccacagagccactaacaagttttgcaagaggataggtttattacatacgcttcaattcaagcaatt

SEQ ID NO: 15 - DNA, 6000 bp, Homo sapiens
cttcctctaggaactactccctaacttggatgagcagacatgatacaatgtagtgaataatgagcatgtatcctggatttagcagacagacgtggtttgaatcccagctctgctacttcaacagctgtgataagcatgtgactagcatgttacttaacatctgttttcttacctgggaaataggtgtaatatgagtacctacttcacagaattgttctgacaatgaaaagagaaaatgcctgagaagtgttaaactcaatgtctagcctagaagcactcattacacccttctttgggccagtcttgtacctaatacctccctctgctatagtttctaactgtgctgcagttatttgtttgatgacatgccctctattggactgtgtacctgttgaacactgtcctatagttcagcaataatagctagcttttttgtacatttaccaaataattccaataattatgcaaatattttacatatattatttgatttaatactgattggaaatgacattaggatcctgcttaacacaaactcagcagcttaaaaaaaaattaaagaaaaagctctcctggctgggcacggtggctcacgcctgtaatcccagcactttgggaggccggggcgggtggatcacgaggacaggagatcgagaccatcctggctaacatggtgaaaccctgtctctaccaaaaaaaaaaaatcagctgggtgtggtggcatgcacctgtagtctcagctacttaggagggcaagacaggagaatcgcttgaacccgggaggtggaggttgcagtgagctgagatcacgccactgcactccagcttgggcatcagagtgagattcggtctcaaacaaacaaacaaaaaaataccctcctggccaggcgcagtgactcatgcctgtaataccagcactttgggaggccaaggtgggtggatcacttgaagtcaggtgttggagaccagcctggccaacatggcgaaaccctgtctctactaaaacaacaaaacttagctgggcgtggtggcgcacccctgtagtcccagctactcaggaggctgaggcaggagaatcgcttgaacctgggaggcagaggttgcagtgagccaagattgggctgctgcaccttggcctgggtgacagagcaagactccgtctccaaacaacaaaaacaggccgggcgcggtggctcacgcttgtgatcccagcactttgggaggctgaggcgggtggatcacctgaggtcaggagttgcagactagcctgaccaatattatgaaacctcgtctctactaaaaatacaaaaattaggcaggcatggtggcatgcacctataatcccagctactcgggaggctcagacaggagattcgcttgaacccgagaggtggaggttgcagtgaactgagattgcgccattgcactccagcctagacaacacgaggaaaactccatctcaaaacaagcaaacacacaaacaaaaaatgatcctgctaccttctaaggttggccagggctgaacaacacttctgcctcttttgtcactgcctgcaatataggggactacagggcttcacccattcatattcggattcagaacagcttcaatgtcctctggtcccaggcttctgaatgatgctcttactgttcatttccttttaggcaggggcttctctttgtagttgcctgctcttagtttccctcactttgttccctttgtcatattatcatttatggcatttgtcagccttatgtccacaaatagatagatggtcccctgttgtctccatgtctaatttggatgggtttcagttgttgttgttgttgttgttttcttttttgaggcagagtttcactcttgtcgcccaggctggagtgcaatggcaagatctcagcttactgcaacctctgcctcccaggttcaagccattctcctgcctcagcctcccgagtagctgggattacgggtgctcgccaccacccctggctaatttttgtatttttagtagagacagggttttaccatgttggccaggctggtctcgaactcctgatctcaggtgattcacccgactaggcctcccaaagtgctggcattacaggtgtgagctaccctgcctggctgggtttcagttttgttgtgaacaaaggtatagttaagatttggtggagcccactaccactgtctgggaggccaaggaagaaggtgctacagacatggttgggttaacctacataatcatttcccctcagctctttgcctttatttccttcctttatttcctatatttccttcccctagtgactctaccttttcttctgcctggcattgtcatgtccttcctttctatttgaatatttttttctttcttccagccttcctttctccactggtaataaatacatatggggcttcctatacttaagcaaacagcctggcacagtggctcacgcctgtaatcccagcaccttggatggccgaggtgggtggatcaactgaggtcaggagttggagaccagcctggccaacatgacgaaaccctgactctgctaaaaatacaataatcagctgggtgtggtggcatgcacctctaatcccagctactcaggaggctgaggcaggagaatcacttgaacccgggaggcgggggttgcagtgagccgagatcacgccactgcactccagcctgggtgaggaagactgtggttcaaaaaaaaaaaagcagcaaacaactaatgattagagacatgcaaatcaaaaccaaaatgagataccacttcacactcattaggatggctactatattttaaaaaccaaaaaaacaagaaacgtgtcagtgggcttggaaagaaggtgtgaaaagatcaaagatcaaaaacagcaagagaatgcaacaggatttaaaatcagtaagagaagattttaaggagaggagccaaggacagtcaagcatttccatcctagaaggatgtggccatttacagaaatagggagacaggaggaattagtaggaggaaaaatgacacatttagttttagacatttagttttctttattgctcaaggatatttcctaaaaaacaacaacaaaaagacatttcgattttttctttttctgagacggagtctggctctgtggcccaggctggagtgcagtggtgcgatctcggctcactgcaagctccgtctcccgggttcacgccattctcctgcctcagtctcctgagtagctgggactacaggcgcccgccagcacgcccggccaatttttttgtatttttagtagagacggggtttcaccgtgttagccaggatggtctcgatctcctgaccttgtgatccgcccgcctcggcctcccaaagtgctgggattacaggcgtgaaccaccgcgcccggccgataacttatatttgaaactagaaaagaggtagaggcaggatgggccatggagagacagcccgcattaaaggttgtgggaagagaatagaagagtcagtgatgggggcagaaaggtaaggtttgagggggcaagtgtagagtctagagaagccaagccgaatttgaggaagaggaggcggcgcggaaactagtgaaggagaaaacatggaaagggctagtgtatttagtgagctccttcggaaccttagagaacaaaggtgttacggaactatatgctctcaaattcacactaagcactaaattcccgccgctatggtacattctggggaaaggaaaaacagcgcagtctggacccaagaaagctcacagcgtggcaaaggaagtgagaagtgagtgaaagatacaatgttgattctgtcttccctggcagtaagaaaaaaaaacaaaaacaaacaatgtttaagtgctttggccgggcatggtggctcacgcctgtaataccagcactttgggaggccgaggtgggtggatcatgaggtcaggatttcgagaccagcctggccaacatggcgaaaccccatctctactaaaaatacaaaaattatccgggtgtggtggcacacacctgtaatcccagctacttgggaggctgaggcaggagaattgctccaacccaggagtcggaggttgcagatcgcgccactgcactacagcctgggcaacagagtgagactccgtctcaaaaaaaaaaagtgctttaagagaggtgtgcacaaggtacaaacagatgccctgagcaactggcgaccgtgtggggcgagactcgggaagggctggtaggaggggctgctgtccaggtgcgtggtggtcctcaagaattcatgggggcaattccagcagaatcggccttttgaggcctcaggcagttcttgtggggaccgaggcgacagataaggaaggaagggatacaggcgcgttagcaataactgggttctatttgaaagacgcagggggccgggcttggtggctcgcgcctgtaatctcagcactttgggaggccgaggcgggtggatcacgaggtcaggagatcgagatcatcccggctaacatggtgaaaccccgtctctactaaaaatacaaaaattagtcgggcatgatggcgcgcacctgtaatcccagctactcgggaggctgaggcaggagaatcgcttgaatctgggaggcagaggttgtagtgagccgagatcgcgccactgcactccagcctgggcgacagagcgagaatccgtctcaaaaaaaaaaaaaaaaaaaaagacgcagggatggagtttgccgcctgaaaggatacaggaaggagaggcgaaaaacttatctgaattctcactgcttccttacaactggcgaccaagtggaccaaaaacctccaaaaacctcagttggctgggctacggggtccttgctgtccttcctgggcttctgtactcggccggaactttggtgttctgacgccttgtttggcatcggaagggaaaagcagatggacctatacgggtaaagtggcttctgggcggaaggtacactataggctcggggaggtaagcggcggcaggccggcggttggtgtgtcccgggtgtggggaggcgacagagccctggcacttgagggttgagggggcctccccagcgcggcgaaccgtctagcctccggaggccaggccgtgagtgcgggaggtatacgccaaggcggaagaattttgccactcactacctgtgtgacctcgggtaaattagccttggaacgtcagtttcttcgtctctataattgaaataataatagtacctctctcaggattgttgtgagccgtcagtgaaacacttagagcagtttctggcacatggtaaggcatggatagctttactaattctactcacttctagctgcgtggattgtgttgtcaaaacccaccgtcaacctcagggcggtattgtccagttaatagtttagattttctgtttactggtagaaaaaaaaaaatgaaacaaagcatttataattaaagttatattattagagaagtaacactacggagggtttggaaaacattttatgagctatcatttgtttctcaaatttcggtatgtgtagaggtaaaatcatttaagtgcaaccggcgcgggggaatttaaatattatccataattccgggacctcagatcaactgttaatttttcctggttcccttaacgtttataatacatgtgaaaacatactgtttacatggttttgatttatcaacaaaccttattgataatgtcggctgggcgcggtggctcacgcctgtaatcccagcactttgggaggccgaggcgggcggatcacttgaggtcaggagttcgagaccagcctggccaacatggtgaaaccctgtctctactaaaaatacaaaaattagctgggcgtggtggcgcacgcctgtaatcccagtgactgaggcaagagaattgcttgaaaccaggaggtggaggttacaatgagccgagatcgcacaactgcactccaacttgggggacagagctggactctgtcttaaaaaaaa

SEQ ID NO: 16 - DNA, 6000 bp, Homo sapiens
ttaaacccaggagatggatgttgaagtgagccgagattgtgccactacactctagcctgggtgacagagtgagactccatctccaaaaaaaaaaaaaaaacacacacacatatatcaatgctatgcatataataactcagtccttgcagtgaccctatattagagttctccagataaatagaatcagcaggagatatatgtacgtatgagagagagacacacacacaaagtgatttattttaaggaattggctcatgtaagtatgaagactgagaagtcctaagatctacagtcagcaggctagagagccaggaagagctgatggttcaggtcaaatccaaaggcagggaaaaaattaatgtcccgactgggcgcagtggctcaggcctataatcctagcactttgggaggccgaggcggacagatcacttgagatcaggagttcaaggccaacctggtaaatacggtgaaaaccgttactaccaaaaatacaaacattagccgggtgtggtggcgcatatctgtagccccagctacttggaaagctgaggcaggagaatcacttgaactcctgggaggtggaggttgcagtgagctgagatagcaccactacactcctgcctggacaacagagcaagactccctctcaaaaaaagaaagcaaaagtcaatgtcccagcttgaaggccatcatggaggaggaattctctcttctttgcaggagagtcagcttttttgttctattcaggtcatcaactggttggatgaggcccatccaccttagggaggacaatcagctttactcagtttatagatttaaatattaaactcatctggaaacacccccacaaaagcacccagaatgtttgaccaaatatctgggcaccctgtggcccaggcaagtggacacatcatgagccatcacagaccctttcagttgggtacagtactttttttttttttttcaagacaacctcttgctctgtcacccaggctggagtgcagtgatgaagccatggctcactgctgcctccaccttcttggctcaaggatcctccgctttgaggattctgggctcaccctcctgaatagctggggactacacacacatcaccacacctggcttttttttttttttttttttttgagaccgagtcttgctctatcgcccaagctggagtgcagttgtgtgatcttggctcactccaacctctgcctcccaggttcaagccatcctcctggttcagcctccagagcagctgggactacaggtgcacaccaccacgcccagctaatttttttttttctttttttgagatggagtctcgctcttgtcacccaggcaggagtgcagtggaacgatctcggctcactacaacgtccgcctcctgggttcaagcgtttcttgttactcagcctcaagtagctgggatcacaggcgcccgtgaccacgcctggctgatatttgtatttttagtagagacaaggtttccccatgttggccaggctggtctcgaactccctacctcaggtgatccacccgcctctgcctcccaaagtgctgggattacaggcatgagccaccgtgcctggccacgcccagctaatttttgtatttttagtagagacagggtttcaccatattggctaggctggtcttgaactcctgacctcgtgacccacccgccttggcctcccaaagtgctgggattacaggcgtgagccacagcgcctggccacacctggctaatttgttgttgttgttgttttgagactgagtctcactctgttgcccaggctggagtgcaatggcgcgatctcggctcactgcaacctccacctcccaggttcaagcgattctcctgccttagcctcctgaggagctgggattacaggtgcgtgccaccacacctggctcatttttgtatttttcgtagagatggggtttcaacatgttggtcaggctggtctcaagctcctgacctcaggtgatccgcccaccttggcctcccaaaattctgggattacaggggtgagccaccacgcccggcctcggcctcccaaagtgctgggattacgggcattagccaccacgcccggccaattttttgtattttttgcagagttagggttttgtcatgttgcccaggctggtctcaaactcctgggctcaagcgatctgcccacctcggcctcctagtgttgggattttgggtgtaccccatcgagtacagtactcacattacccccatcttagtcacctcaggctgctatgacagataccatggactggatggcttaagcagtagaaatttatttctcactgatctgggggctggaagtccacgaccagggtcccagcatggtcaggttgttggtgagggccgccttcctggtttatagatggctgctttcttgctgtatcctcacctggcagagagagataatctccccagtgtctcttataagagcactaattccattcatcagggcttcattttcatgacctaattatctcccaaaggccccacctcctaataccatcaaatcagggattagagattcaacatatgaatttttttttttttgagatggagtctcgctctgtcgcccaggctggaatgcagtggcacgatctcggctcactgtaacctctacttcccaggttcaagccattctcctgcctcagcctcccgagtagctgggactacaggcgcccgccaccatgcctggctaattttttgtatttttagtagagatggggtttcaccgtgttagctgggatggtctcgatctcctgaccttgtgatccacccgcctcggcctcccaaagtgctaggattacaggcctgagccaccgcgcccggcctaatttttgtatttttttgtagagacagggtttcactacgttagccgtgctggtctcgaactcctaaccttaggtgatccacctaccttggcgtcccaaagtgctaggatttcagatgtgagccaccgtgccgagctacagggtttttgagagggtaaaagaatcaacatatgcaaagtgtttggctcatagtaaagaagcggtggctgttactgctatttcagctttaacatggggacatagagcacactgtgacaacatgggactgacaacatggggcttcccagaaagcctaccgatgccagcctcctggcccttttctttttctttctttttttgagacagagtctcactctgtcgcccaggctggagtgcagtggcatgatcccggctcactgcaagctacgcctcccggattcacgccattctcctgtctcagcctcctgtgtagctgggactacaggctcccgacaccacgcccagcttattttttgtatttttagtagagatggggtttcaccgtgttagccaggatggtctcgatctcctgacctcatgatccgcccgcctcaacctcccaaagtgctgggattataggcgtgagctaccgcgcccggcctcctcctggcccttttctccaaagcatcctcacctctggttggggtcttgtaataaagacccctttaccatcttaggcagcccaaacaattgaacaagttggtaccaacttgaagagataagaggctggtgtcctgctgaatcccccttgaatgatggacagtcctcttcaagaatatgtgttcattatttcaccagcaacctggggtggtggaatcaccagaccatttgccatctagttcacttgaggcaaaatgcagcaatccaactggcctcagcatcctcatcgatgaaatgagagtgataataaccatggtggtaaatgtgataagttgtcaagggtgtttcattgtaaattgcctagggggtattgggaactcacacacacacacacacacacacacacacacacacacacacacacacacacatatatttctggagacagttttgctcttgttgcccaggctggagtgcaatggcatgatcttggctcactgcaacctccacctctggggttcaagtgattctcctgcctcagcctcctgagtagctgggattacaggcacccaccaccacgcctggctaatttttgtatttttgtagagatggggtttcaccacgttggctagtctggtcttgaactcctgacctcaggtgatccacccgtcttggcctcccaaagtgctgagattacaggcgtgagccactgcacccagccctgattgtcaatatctaatcaggttcctcattttccaccattccccaggtgatgtctgatcaccttgccctgccttcagcaagaatcttgttagatgggtttaagcgagaatcctctcatctctgatgcagtttcctatgcactggcgctcaatcagtggatcctttctccttcctcataaattcccagttgcccatgctgatttctgaattgagcccaaatactctccctgaccgcaaaacccactgcagtggtccctacacccatcatgatgccaataaagtcggccttgtagtctttaacaagtgtcattcaatattttttttaacatcctatacataaaactccagccaagtgaggtcctgattcttctatgtgtctccggttcccatctatgagaagggcacaacgcaaccagggttttgggcagccttccatgaaagcacctggaagccggagaaggggggcggggggacttttgacacagatggggaagggcggaggcgctgggtttgagcagcatcagcccagaaatgcagaactgccaaaagaaacccccctaaaaggcaggacacttttaaagaaaataaaggtgaattccaggcatgagctttcgacggggaatggggcttccccgactcgcccccacgccccccgcccttctccccaggtgcgcagcccgcgccgcccaccccgggcgcggcgaggcgacgggagccgagctctctaggacccgaggaggaagagctgcagggagacagtgcctccagcgggtgctgccgcgagcggccagccgaggggctggaaatgaaagtaaagcgctccagagccacatggacggagctgccggggcggcggcgccgggagcaggatgcggccgcccgtaattaaatagcatttactcttattattactaataataataacgtaatcatacctctagtcatagcataccatttatcgggctcggcgcaggcccgcggggagcgcagcccggcggaggtgagtgcttggcgcggcccgagccccgcggggcagaggccggggacactgcgtccggagccgcccgcgcgcgagggttcggggacgcccgggccgggcagggctggggaagaggcgaagagagccctttccaggccggggccgcgcgccgggccacctggaaagtgggattttgcaaaaaataaatcgtctctaaaaccccatttgctcctttttggggatcccggtccccgtgccctgccccaaagtttaaaagttaccgtgtggccgggggcacctggcgctggggagacttggccgcccctgcagcccccaggaggtgtcttgaaattttcgtggggcctctctcttcggcgtccggagcttctggggtgtccagatgctttgccgaccccgcgcagggggtctcgggggctggcaggggcgtcgctggcagggccccccttccttttgtgttgtccttggccccgcagcacccggagttggaggggccgcggcgagggccggggagcggggccgcccgacgggccgcccctttcggctgcggcggccacgcgagcccggggatccggggcctgcagccgggcccgcgggaagggggcggcaggaaaggggggcgcggtctgggcctgctgggcaggggggcgtttccggtcgcaggatcagtctctggacttcgaggcctgtgggaggcccgcggccgtccagggagtgctagggggctgcggaccccggctctggcgcctggggacgggggcgccctgacggggctgggggcctgggagccgccg

SEQ ID NO: 17 - DNA, 6000 bp, Homo sapiens
agaaataaattcaaacatatatggtcaactaatttttgataagagacacaatgggataagggtagtctcaatagtgctgggaaaactggatttccgtatgcaaaagaatgaaatttgatcattatcttacactatacaaaaacatcaactcaaaatggataaagaacctaattgtaagaccaggaactatcaaactcccagaagagaacataggggaaaatcccctggatatggaccttggcaatgagttttggacatcacaccaaaagctcaagccacaaaagcgacaataaataaatggtactacatgaaactaaaaagcttctgcacagccaaggaaacaatcaacaaataagtggcagctacagattgggaaaaaatatctgtgaaccatatatcaaataaggggttactgtccaaaatttataaagcactcatacaactcaatggtagaaaaacaaataacctgatttaaaaatgggcaaaaagacctgaatacacatttttccaaagaaaacatgaaaatcaccaacaggtatatgaaagggtgctcaacaccattaatcatcagggaattgtaaatcaaaaccactatgagatactacctcacacccgttaggatggctattaccaaaaagtcaaaagataaatgttggcaaggatgtggggaaaaggttgtacactcttggtgagaatgtagattggtacagccattatggaaaacagtatggagatttgtaaagaaattaaaaatcaactactatgtgacccagcaattcctcttctgggcatatatccaaagaaaatgaaatgatcacctcataaagatatctgcactttcatgttaattgcagcattatttacaatagccaaggtatggaaacaacctaaatgggtaaacaaaatgtggtatatacatacaatggaatattattcagacttaaaaatgaaataaattcagatacatgctataacacagataaaccttgaagacattgtgttaagtgaaataagccaatcacaaaggacaaatactgtaggattacacttaccataagatatctagagtggtcaaattcacagagacagaaagtagaatgatggttgccaggggctgggggaagggaggaatgggtacagagtttcagttttggaggacgaaagaaagttctggagatggatagctataatggttgcagaacagtgtgaatctttttaatgtcactgaagagtacacctaaaaatagttaaaacaacaaattttatgttatgcatattatgccacagttttttaaaaaataactccccttttctgatattgcataatatgtctatgtgcccttactttttactctgggaacagtgtttgtgacagcgaagcatggtctctggagtatctcttaattacagctttcagataataaatttttttattgcaattagagcattatgccacaagatgtcattctttcattaaaaatggtaccaattcggttcagtagttgttaacaaaaagtaatgccaaggcaacagacaaaagcctgggattactcatccatgcttcacatatacaaagacagttttctgggaaagaaagggcttccaagtgtgaaatgtattaattagctactcttatttttgaaacttgttaatgtttctaatcttcataggtacaaattggttttcattataagttgaattggtgtaatttttttttttatttttatgttttttgtttttttgagaaagagtcttgctctgttgcccaggctggagtgcagtggtgtgacctcggctcactgcaatctctgcctcccggattcaagtgattctcctgcctcagcctcccgagtagctgggattacaggcgtgcactaccatgcccagctactttttgtatttttagtagagatggggttttgccatgttggccaggctggtctcgaactcctgacctcaggtgatccacccgccttggcttcccaaagtgctgggattacagatgtgagccaccatgcccagcctgaattggtataattaaaacataactaatagtaaaatacaaagacaaaacataaagatcactgatcactgaaagatgtaagtggttttatcactaaatgatgtgtgaacctggacaagttatctagtttctctgattttaccagagtgttaaaaacttcctttctgaagtcaatatacattgctatatatttaatatatactactatatatttaaacatattcttctaattctaaagtattttggtttttatagtagtaaccaaactataattgttcaaatataatactaacaggagttcagtaatagaaaatgctatatgcaagaggacattaggaaatataataagaattcctgatatcttgaggaagtatttaagtaaaatatttacttgtgtaaaaaaattacagtcagaggtataaacttctgcaattaaaaaaaatcacatttattaatgagaacatttttaaaagatgatggaatattctgaagttttaaaacagctttgctaagggtcatttctgtgtgtcactttatttctttttatatagctatagtatatttaaacaataatgctgtcttttataagggtttgtctatttacctattctttactcagacattgatgtagaccttgtcagattattctgagtattgttaacagtgcctttttgatggaattcacactttttggctgtcaacttgtgccatatacacacaaaattttgtggaaggcagttttaattttttgaagaacatctgtcaaaatttaagaaaacaaatgtataaaattccattttttccagtgtttagcatttctagtaagcagtgaggttttttgtttgacatacagtgatgatggcattattgacaagctatacatgagactgcagattatactgaatcatgttaaatgtacagaaataaaatattagatttatatcaaactttcgcatttgaaccagtggggaaaaccccacagaaatcagtaagttaacatttcaatgtctttcttatttgactaagtggaaagagagtctttaaaatgtataacctgccattatgtaatttggtttcattttattctacctgttgtgtgagtttagtatatttaatttactttgtgttactctacatactgtttatttttgttacagtttttaattgaagatggactctgaaagtggtataggaccagtgtcttattaatatcattaatatattaagaggagccacacaaaacccatgacaaaatgaatggaaatattctttctaaaaatttagaaaattttatacttttgcatttattatgtaaaattatttgttttacaatatcaaaatttttcgtttaaagaaaaaaatgccatgaaacatttgaactgatgagccacagaacttcagttgaaatttttttcactttttagcatgctaaatatacatctcagtttaaatattctgtttaatggccatttataaattcaagcactaccactggtcagttttgtgtgatagaataaaaatatgttacctgcagtgtaagtatagcacactgtcaaattcttttccttaaggtgcacagtaaatgtacagatagttataggccactgtttttgcaatgtagtacatttctaatctattattcctaacctattataactgtttgcagagagaaaataattgaatttttctaataatctgtaaaattatgctaacttctacaagtaggcttctaaataaaaattttaaaaagagcaaaaaaaaaaaaaaagaaagaaaaaacagctttgcttggtcagcactttgagaggctgaggcaggtggctcatctcaggtcaggagttcgataccagactgggcaacatggtgaaaccccttctccactaaaaattagctgggtgttgtggcaggcacctgtaattccagctactggggaggctgaggcaggtgaatcgcttgaaccgggaaggcagaggttgcagtgagccgagatagcaccactgcgctccagcctgggtgacagagtgagctcccgtctcaaaacaaacaaacaaacaaacaaacaaacaaacccccgcacacacacacaatccccccctccagaaaaagcagctttgcttaaatgtaacattttcaagattcaagaacacattcattctctctctctttttttttttttttgagaggcagtctcgccctgtcccgggttcaagtgattctcctgcctcagcctcctgagtagctgggattacaggcatctgccaccacgcctggctaatttttgtatttttagtagagacgggatttcaccaggccaggctggtctcacattcttaactattataccatttcaattggtaatcttaccgttcaactactataatacaaataatttttttaaacttctaatttttggaggacccttataactgatttctaatacctaaaaataataaaaagcccaaatgtccactcctgggtgaactgctgggcactattgtatgttaataaactaggatattatatttttattagtagtaacaattattaagattgagagtcttaagaaaggctattggaaataataggtaaaaatgtagaactcagaatatgagaaatagaatgtaaatgatataattgtgtaaaaaatgcctagtttagaatactgaagtttgttttgtttcattttatttaacttttaaaacttagatcttttgtttaatttttattttttggatggttaagtacatgaaagaagaaaaacttggttaattttgcctgattattttaaacattggaagcaaaatacaagatttgtatttcatactacaggaccgcttccatcatccatctggagagacagagagagagagggagagagagagagaagcgcggcggtgataagtctcccagtgtgagagaaatcggggaggggcgaagaagggtaggcctcttctgttccattgataccacgttcattcacagggagccggctaaaacagactactcccccgtgcagtcgttccctctaccctaataaggctttggcgcctctcccagaactcggtaagttcaaagtgtagtaaagtgcatgtttccaaggaatcatctgaaatgattttgtagatagtttattgcaggttggagaagggagaaaatgaaggaaggggtagagggggcaattatcacgcatcgttttgctatcgtatttgcaaggggaagaaaatctcaatgcatacatggttcgaaagtgattatttagacagtaagcagtttccccaggaaagctcctcagagggtctcctcgcaggctgcagattctagaaagtctgcggaagagtagttcgcaggtgcatgtgtctgggcgaagcgctgcgtgtggctcagttggtggcagtctctgcctctgtccgcaggtcctggggaatgctctttgcctggtccagccccgacaaacgtggtctgagaacagcggagcgcggaaaccgcggagcatgactcctccgaagctgcgagcgtcgctgtcgccgtcgctgctgctgctgctgagtggttgcctcctcgcggctgctcggagggagaaaggggcggctagcaacgtggcggagccggtccccgggcccactggcggctcctcgggtcgcttcctcagccccgagcagcacgcgtgcagctggcagctcctgctgcccgccccggaggccgcagcgggcagcgagctggcgctgcgctgccagagcccggacggggcgcgccaccagtgcgcctaccgcgggcatccggagcgctgcgcagcctacgccgctcgccgcgcgcacttctggaagcaggtgctgggagggctgcgcaagaagcggaggccctgtcacgaccccgcgccgctccaggcccgcttgtgcgcgggcaagaagggccacggcgccgagctgcggctagtgccccgcgcgtccccgcccgcacgccccaccgtcgcgggattc

SEQ ID NO: 18 - DNA, 6000 bp, Homo sapiens
ttgctccattacatgcttgaggtaaacatttgcattctttttgactgcccagcatctgaaccttcatctgtgtttggggacttttcaacaaatgaagcagcatgcatgtccccccacagacactgaaaatgccagatatttgttttcctacctccacagctgggaggaaggtgagatacaacctagactgcaccagtcagttccattcacaacagactttgaataaataaggatacagtgaaattaagaagcagggataatccattgtagtgagggggcagaagtggtaacaccctgtttccagaggcaacagtgtcagggatttagaacacagccttgtgcccagcatagctggtctggatgccaaaaaccatgcagtgtagccgagagagagcaggagtattgtcatcacaggaccagcaccacgactttttttttttttttttttttgagacagtctcgctctttcgcccaggccgtagtgcagtggcgttatctgggctcactgcaagctccacctcctgggttcaggccattctcctgcctcagcctcctgagtagctgagaccacaggcacccgccactgcacccagctaattttttttgtatttttagcagagacggggtttcaccgtgttagccaggattgtctcgatctcctgacctcgtgatccgcccgcctcggcctcccaaagtgctgggattacaggcgtgagccaccgcgcccggcctcgccacgacttttaaaggcattgttcccaacttctaagccttgttctctggcccttctggagtttcatcagctatcacataccattgtaataaatttcctttctgcatatggtaagcccaaattgacttttgctgtttgctactaagaaccctgtgtacctgctgcatctggaaccatccccagacaccacactttttgtaatgtaactgcttactcctctgttgccacactagactctaagtattattatgattggatcctcagtgccctgtaatcacccaagaagacactgattgaatgaatgaattaaactttctgagctctcatttcctcatgtataaattgggaataacagttacttggttttttgggttttttcaggcagtttccctctgtcgcccaggctggagtgcagtggcatgctcttggctcactggaatctccgccttcccgggttcaagcaattctcctgtctcggcctcctgagtagctgggattacaagcacccaccaccatgcccagctaattttcttgtatttttaggagagatgcggtttcacgatgttggtcaagctggtctcgaactcctgacctcaagtgactcaactgcatcggcctcccaaagtgctgggattacaggcgtgagccactatgcccagccaaaatagtagttctaaagaaagatggagaatgtttttctaacaggaaataaacttggacaacctccatctcaatcatctcattttacagacaaggaactgaggcccccaaagagtaaatgatttgcctaagtttggtggataagttcagagctgttttttactcctaggtcagtacattttctacacaccatgatggccataaaatattataggcatcaatgtttgtatcccccgcctccaccttcacatgttggagccctagcccctcaaggtgatggtattaggaggcacggcttttgggatgtagttaggtttaggcgagataatgaggacagggtccctatgatggaattggtgcctctaaaagaggaggaagagacatcagagcttcctgagaagccatctgcaaggcaaaagagggccctcaccaaaacccaaccacatcggtaccctgatctcaaacttccagcctctagaacagtgagaaatacatgtatgtttaagtcacctaggctatggtattttgttataatgcccaagctcagacaaacattttattcgataatactttcactttaaacttaaactgggccaggcacagtggctcatgcctgtaatccccgtgtgtccagaattagtgggttcttggtctcactgacttcaagaatgaagccgcggaccatcgcagtgagtgttacagttcttaaaagaggggcgtccagagttggttccttctgatcttcggatgtgtttggagtttcttccttctggtgggttcgtggtctccctggctcaggagggaagctgcaaaccttcgcagtgagtgttatagctcataaagacagcgtggacccaaagaatgagcagcagcaagatttactgcaaagagcaaaaggacaaagcttccacaacgtggaaggcgaccccagtaggttgcctctgctggctcgggcagcctgcttttattcccttatcggccccacccacatcctgctgattggcccattttacagagagctgcctggtctgttttacagagagctgactggtccgttttgacagggtggtgattggtacatttacaatcgctgagctagacacaaaatttctccaagtccccacagagcactgattggtgcatttacaaaccttgagctagacacagggtgctgattagtgtgtttacaaaccttgagctagacacagagtgctgactggtgtatttacaatcccttagctagacataaagattctccaagtccccaccagattagctagatacagagtgctgattggtgcatttacaaaccttgagctagacactgagtgctgattggtgtatttacaatcccttagctagacataaaggttctccaagtccccactagactcaggagcccagctggcttcacctagtggatcccacaggggagccgcagctgcccaccagtactgccccgtcagccccacactcctcagcccttgggcggtggatggaacccggcttggcagagcagggggcagcgctcgtgggggaggcttgccccgcaggagcccacagtggggcggggggtgcggctcaggcatggcgggctgcaggtcctgagccctgccccgtggggaggcagctgaggcccagcaagaattccagtgcagcgctggcgggctggcactgctggtggacccggggcaccctccacagctgctggtctgggtgctaagcccctcactggccagggccggcggtgccagccggcgctcagagtgcagggcccgccgagcccacacccacccggaactcccgctggcccgtgatcgcggggcacagcagccccggttcccgcccacgcctctctctccacacctccctgcaagcagagggagctggctccggcctcagccagcccagagaggggctcccacagtgcagcagcgggctgaagggctcctcaaacgcggccagagtggatgccctggcctgaggaggtgctgagagcgagcgagggctgctagcacgttgtcacctctcaccagcactttgggaggccgaggcgagtggatcaggagttccagaccagcctggtcaacatggtgaaaccctgtctctactgaaaatacaagattagctgggtgtggttgtgcatgcctgtaatcccaggtactcgggaggctgaggcaggagaatcacgtgaacccgggaggtggaggttgcagtgacccgagatctcgccattgcactccagcctgggcaacaagagcaaaactctgtctcaaaaaacaaaacaaaacaaaacagaacaaacttaaactgaaatacgcatgcatttattggtaggtagtgcagaaggctggtgcaggggttatgaagaatgctatgaagtttcaagtatggcaaccagcatatgcattcacgtttgctatgtgtgctcaggtgtgagagccagagcgtgaaaattacttctgctcacggggagtccagtatatacactatcttgtcctctcgggaactctataaagtagaaattgttacgctacagattattaaaacaagaaaaaaacaggctcagtaaaggtaattgaattattttgggtgctgcagccaaccaccaagttgcaatgaccaaatcggagccaaataaattgctcacttctggtccgtctcatgtccccatctaaattacatcattaatttacaatcctttggcatttttcataatctagacagcactttcccttctttcgtctgtttaagtcttgccattcttcctacctctctgaggaaggagttcataagagtaggaataggctattaaattctaaccatttcagataaccataagtatcctgatttatcatattgccataaataagcctaggagaccctacttcataaatggtttcttgtctgtacattaggtaatcggtgtgaatttccataagtctctaaattcaaagcattaatgaaccacaaataggcttttaacaattgaatcccggttgctattcttgaccttttcatttattttcagagaccacttctcatttaagtgacacttagcaactaaaaagattcacagagtgattcagagtcgagtatgatgtcctcactgttgaatgctcatagaatattttttctctttccatagtcttgaggaccaacgcaaacgtctagaggatgtgggattcttacctgctaacatatctttggcattaactccccaaatctttgaatgcaaggcacgcttacctgacaccctaaactgctagtttagggacacccgccgcagagcggaatcgttcaaggtcactggggctgcaggtgcggggccttaaccagcgctgccgatccgtcagctctcggcccacccttggggatccccatcgcccactgcgacctagctgggagaacccagtccgcccgccctcccggtggccggtcttggaaccgcgcttctggaaggttcctgagtggctggcagtgggggcggctccaggaagccggggcggagcgggcggcgttggagtctcgggctacgcctccctgggccgctccgccccgcccgttgtcggaagccgcgctccgccaggcaggagacactgtggtcgggagtaggcagcggcgccgcgtccgctctcgcccgctctcgcccgctcgccagccggctctcctcccgccgcaggacccgcgcgccgcgctcgggggccatgcagcgcctggccatggacctgcggatgttgtcccgggagctctccctctacctggaacaccaagtccgggtggggttcttcggctcgggggtgggcttatcccttatcctgggcttcagcgtcgcttatgccttctactacctgagcagcattgccaaggtgagccgggggtggcgcagggccgcgggctgctgggccaggagctagggtagcaggcgcggcgcgaggctgcgcggccaggggcggtcggcagccccggggataggcggcgagctgctcccgagcggcagcccccagcgcgcgcgggaaagccaacaggccccgcccgttcgcccgccccctgggggtcccggccgggtggtcctcggagcgcagcctgaacccggctgacttctgcgctgcggcgctgcccggtcaccgatcgcgaagccggcggcgcactcgggaacgccgtggcgcttttgaaaatgactccgggcagggcacggtggctcacgcctgtaatctcagcactttgggagcccgaggcgggtggatcacctgaggtcaagagttcgagaccagcctgaccaaaatggtgaaaccccgttacaattacaaaaaattagccgggcgtggtggcggacgcctgcaatcccagctactcgggaggctgaggcaggagaatcccctgaacccgggaggcggagttaaaaacaaacaaactcccttatcgcgattctcgccttcccctcggggcattggcgaaacccccgtttcagtcctctgtgactgtgaattttttgcgtcagccctccagaaagagttgtaatcggaggaagcgcgcgcgcgagcgacaagtctttgccggtttctggtttacggttggcagaaactttgctctgggcccttctctga

SEQ ID NO: 19 - DNA, 6000 bp, Homo sapiens
tgtttccattttcttgactgttatgaataatgttgccatgaacattaatgcacaagtttttgtgcagatgtgtattttcatgtgtcttggttttatacctaggagtagaattgctgagtcataggagaactcctccatgtttaaccattaatgaactgccgaactgttttccaaagaaattgcaccattgtacaatcccaccagcaatgtatgagggtagaatccctgatttttaactgatcattgagctcaggcccattcaaaacaaagatgacatttcctaaccttccttacaagtagttctgaccagtgagatgggagaagaagttaggttttgtccttaaaagaaaggagagtggctgggtgcagtggctcacgcctgtaatcccagcactttgggaggccgaggtgggcggatcacctgaggccgggagttcaagactagcctgaccaacatggagaaacctcgtctctactaaaaatacaaaattagctgggcgttgtggcgcatgcctgtaatcccagctactcaggaggctgaggcaggagaatcgcttgaacctgggaggtggaggttgtgatgagccgagattgtgccatcgcactctagcctgggcaagaagagcgaaactccatctcaaaaaaaaaaagaaagaaaggagagtacattctacactctcctctcctccaccctgccccctttccagtggctggatgtggacatggtggtaagctatcttagatcatgtggacaagggaaacacatagggatattagaacctccagacagaaggaacttaggaccctggacagctttgtggagcagtgctcccataccagcgtgaagttttgtatgggagaaaacatacatttccagcttttgtaagccactgttattttgggtctctctcagagcagccaaatatataatttaactaatatattttctttctgtgattcttctttattttgattatacttctacttctctgcccctcttttaggtgggaggtgctgctccaagcactaactcagaatatagaccctctccctcttgtaatagtgccagcttggagttctttgcttccactgtaggggaaggaaggaaaaaatatggagaactcacatccactcttcattgtcctcaaacagaagtaacccattttgttctgctcacagcccattggccagaactaactgtatggccccaatctaattgcaaaggagtctgggaagtacagcacagcacatggatctttggaaagcgttaattttctctgccaaaggcttcttttgttgttgttgttgtttgaaatggagtcccgctccgtcacccgggctggagtgcagtggccctatctcagctcactgcaacctccacctcccaggttcaagcactcctccagccttggcctcccaagtagctaggattacaggcgtgtgccatcatacctggctattttttttgtatttttagtagagacagggttttaccgtgttggccaggctggtctcaaactcttggcttcaagtgatccgcctgcttcggtctcccaaagtgttgggattacaggcgtgagccactgtacccggccaatactggtgttttctgacctcagcgtttttcttttctcctgccatgtactctccctagagatttcatctactcccaagtcttccactgctcctatctgctgatgactcccaaaactcagtctccagccgagacttctctcctgggcttgagacatatgtatccaactgccagaacatctccagtggacagcctttgggcacaaggccacactagcttgtgggtacaagtaatcacccaaagtcaatttcagtggctctccactcccacattttttcaacccctggaaatgttcccttcccaaatactctgagtctctcttctcttttcatgactgtggttttgtgactggatggtagctcctgttgctttttttcctttcaaatgaattttctcttaggaggcttcttagccattaagcaaatagacctcaactgggcttgccctatgcctatctgaaacccagcttaggttcgagttaggactcctgttaatctgagctctcacttcctgtcccaacctgcttattttttttggtgaaagaaaatatcatccccctagttgctcagaaacctgggaatcattgggattttttcctctccttcaccttcctcatccaatcagtcaccaagtgctatcaactctgctgccttagtagccctcaatatatacttacctatcaaccatcactgctatgccatacttcaggccttcatttctcacttggattattaaaatatccctaaatagttcctctgccttctctctggccaccctcctgagtgatctctccatcatgtacctttcagtgactgcttgcacaagcccctttgtgacttggtcatagtctgctctcttgaaccaccagagccaagcacctgggttctgattctggttgcaactcttactgcgtgatgatggacaggccacttgatctcctcaaacctcagttcctaaatcaaatgaatgattgaattcagtcacttaactttgtatgtagtaggtaggcactgtgcaaaacatactagtggatatagagatgaataagaaaaagcccctgcactcaaagagctctcggattcatcaacaaattattgtgcagttagatagtaagtgctataatccaggaatatacagtgttgtgtgaataatgtggaatcagtttatctccagagcagaaaaaggtgaaggccgaagaaggcattcagagtgatactggagctgtgtagcaggggctactactgttccctcaaatcctttcttctcttcttcctgagtaatagagtcctttttcagctaggcatacagccatccaaaataaaaactatatttcccagcctccttttcagctaagtgtagccatgtgactaagttgtggccaatgggatgtcagtacaagtggtaatggcaatatctgggatgtgtctttaaaaggaaggaacatgtccttctccttttcctccttcctgttccctgggaggtgaacttggtagctggaggtgaagcagctggaacttggatatgagcgtcttgttgatgataatagtgcaacaagataaaagcagcccgagctggcctacatttacatgagaaggaaataagactccattttgtttaagctattctcttgcatatatatatacacatatatatcagctaagtgtagccatgtgactaacttgtggccaatgggatgtcagtatgagtggtaagagcagtatcttgtatatatatatgtgtatatatacacacacacatatatatacatatatgtatgcaagaatataaaatatacatgtgtgtgtgtatatatatacacacatatatatgtcccttgcagccaagtctaattctaactaatacaaactaactctaaaaaatgaatatatattcaccaggggataggctatttcaagcagagggaagcctgtataaaggctcagggaatgccgtggttttatgtggcagcagatgagactggaaatgagtcaggatgagccacagtggaggatgaattaaatgggcaggagtgtggtagaaagacctgttggaggctatgaatgcaatcaaggtgacagacaactggtgcaatgatggtagtggaaatggaggagaggggattgattcaagatgcatttaggaccaagaatcgggagcttgtgaacgtgtgtatgagtactgtagacggagtgggtgtgtcatcagagaagatctgagcatttgggcttgctctcctcagaggccctgcgagtggagttcagcttttcctcatggggcaaatctcactttcgctccagttcctggggctcagagtccctggcccagatgcctcttgccatctcatcttcaccctgcctggcttcccttgcttgttccaggattgtttcataaagagggatgtggttggtctttaaccctatgaatgctggctgaggatgcctgcggaacctgtagtgaagctttcaggggctgctcgggttctggctggtaggtgaacactgtccatcttgccggctgggacacagtgactctgggtagttgtgtaagagaggggcccttggcagacaaacaggttcttctctgttggtgggccagccagcaggtcagtgggaaggttaaaggtcatggggtttgggagaaactgggtgaggagttcagccccatcccccgtaaagctcctgggaagcacttctctactggggcagcccctgataccagggcactcattaaccctctgggtgccagggaaagggcaggaggtgagtgctgggaggcagctgaggtcaacttcttttgaacttccacgtggtatttactcagagcaattggtgccagaggctcagggccctggagtataaagcagaatgtctgctctctgtgcccagacgtgagcaggtgagcagctggggcagagggatgggggtcacagtcctaagggagggcattgcaggtggcctcaggggagagcctggggtggcccctaagacgtcctcttggaacattttggcagagttgcctcttcgccctcattatggctcagtttttccaccatgaaatgggagggagggagacaggtgggcaggggagaggtggtagaagtggcctagagaactgttcctggggtctgggacctttgcgaaggggttagagcaccacgctccctgctatgtgactgaggtagcaagagcacgccctcttcccatgtctgaggaagacaccctagcctccttgactcacctaggtcagtcctcttgagccccaacagctctgtgctccccagcccaaggaaggggtaacaggatttcgggcagttgcccctgcagaggccccctgggcaagtcccctgcgccatgtcccttcgtctccttcttcccctaaccaggcctccctccacctgtcttctcagagcaggtaatggcaagcatggctgccgtgctcacctgggctctggctcttctttcaggtgggtctccgaccctgacttcaacgtgggggtgtgggtggaggctggccagagggccctgtccaccctgggggaggagagcccaggccctgattacctagtccctctccacagcgttttcggccacccaggcacggaaaggcttctgggactacttcagccagaccagcggggacaaaggcagggtggagcagatccatcagcagaagatggctcgcgagcccgcgtgagtgcccaggggaaggggtgtaggcgaagggaggagacagctgggccatgccatgatgacctgcctctgctgcctcaacctctgtggccgctgctgggacagaggaaaggagcggtgctagctctgtctgcagatcccggccatcctgggctctttagcgccctctgcctgcagcccccgccttgacaactccgtagctgttgcccccttgctcactgaggcgcgggacctgggatcaatcgggaggacgcccgctgcagtccccagaatcaaaggatgatgtggcgcatctatgtttctttggagagtgttgtaggtctggatttgtatgggcaatgtgtttgtgcttcgtgcgtgagttgttactggccagggctaggacaagagccctcgaccctggggccaacgccctgcgtccttggttcccccagaggatcagtgcgcgatgacttggggacaaaggagatgatggaggctagcagtctgacggcctggatatctgtccccttctccaggaccctgaaagacagccttgagcaagacctcaacaatatgaacaagttcctggaaaagctgaggcctctgagtgggagcgaggctcctcggctcccacaggacccggtgggcatgcggcggcagctgcaggaggagttggaggaggtgaaggctcgcctccagccctacatggcagaggcgcacgagctggtgggctgg

SEQ ID NO: 20 - DNA, 6000 bp, Homo sapiens
tgaagaagatgggatcattccagtcactctgagtaacttacagtggctttttttaaaaggaggatttctttcctttattttagtttattttttaattatgtgtttatgatttttagtgatggggttttgctctgctgcccaggctgaagtgcagtggcatgtcatggctcactgcagcctcaaactcctgggctcgagcaatcctcctgagtagctgggaccacagccttgcgccaccaaacccaactactttttaaattttttgtagagatgaggtctcgctatgttgcccagactggtcttgaactcctggcttcaagcgagttgaagcttgaagcctcctgagcagctggggttataggcataagccaccctttccttttttttaaaaaaaaataattatttgaggtgatatttgtgtaataccaaattagcccttttaaagtgaacaattcagtggcatttaggacattcacaatgctgtgcgcccactacttctacctgttccaaaccattttcatcattttatggtaaaacctcatctttgtggtgccttttagatctttctttattaattatttattgagcatctaccatgaaccgaagtctgtgtggtactggggattttgaatggtgattacacacagtctctgccctcagtgatagccagcctttaccccaacatgttctttaagtgttctagctcttagaagcagagtcctcatttcctcccagacagcagaaagattggtaactatgtagcacccatgccccactctgctggcccttgcccttatcagacattgccaatcaattgcagcactcttactgatccttgaggcagcctagtgaccctgtggagctcaggtacattgccaaccaacactgagaaagctttgggtcattccgagctgtgatgttgtacacacagaggtctgtatcatatatacatacactgggttccatgaactcaagtctcacttgtccacaagttgcagggcaaccgggttttataggcttacaggaaatcacccctagtcctcactccatgcctgcagggaaaacgttgtgaaggtatcctagctggttcctgcgggtcataaggatgctgaagaaactcccagcatagacagatacagtgaacctggcaagtcactgctgttgggttggtgtgtgtccagggaggtcactcacagccatgacctgctacggaatttgccaggggtctaatgcaaatgaaagtacagttcccttattcaaaaattatgaagagctgcaaggtggtggtggtagggcgggaagccaagtctgggcccttttgagcctggggccctgtgcctgtccaggcagctctcatcgcagtcattctggccatttacccccactcgggctctgcatgaggagctggcctggcctggaagcgcagtgtcgtggagagcctggtgtctgctctgccccaagctctccccctttctaggcagctgcaccaaagcagcttttggagaacctcctctccccaggcctcagcagaggaggttcaggtgagctgatcctaccccacttccatcctcctccgtgccaccagcctggctaacccgtagttcccatcccttagtgacgaggaccagttcagagttggggagaggtgctgtgaggaggtccaagcaaactcggcttggtgctttctctggagctccaaggaaggaggtggccccttgaagctttggtagtggaactctcggattcagccatgtctgtcaccacccctcctcctggtctctccagtggccaaggggtaccttttctgctccagccagaaggacttggatttcagcccattggaactgaaagagtccctggagtgagtggggctcaaacgtggggctaggtggcttagccaagtggatgccccactgcacgtggctgcaggaaagaccaataccccttgtccctcatggcccttgctgtgtcctagacttcagccctacagccgagggggatcctctcagcaggactcctgctggtctgtgttcccatggcccagaccaacccatggacattcaggacaccctggagggtcctcacaaagaagggatgttacccacagggctggccctgagggtcctgctgggcccaagggagcagctgatggggtggccttcagcccttctggattccttgcaggggctgggcctggccagcctgtcctctgccctagaagcacccaggggtgatgtggctctggtgaagcgcacaggtcctggagtccagttacgaggcctggagcttggcttgtcctaatattagcagcagggcctcggggagcctctgagagcttcagttttcttagggataatgaataatgctgtctttagatttttgtgaagatgaactgggataaagcagatggagtgtttagcacaggtcctggcgcatcggaagtgtttagtgaggatgaatgattaggcttcatcttcccctctgcatcctcttctgaagaaacctgctcagagttcaaaaggcccaacccaggccacacctaaggaggccaacagtgtctgctggcctcagacggggttagtcagcgtccttggtagtgtgtacttgagagggctgccatgtgaagccccattctgtaggtcaccaatagatccatgtgcaaacagatcaggggccacgaaggctctggcccgtggacaggcggcagggccggcagaaagagagacctttcctagcacacctcgaatttgtcttcatgctaacatttctgtctcctaactctttcctccagtgacctcttccccaccaaggctagggagaaaaggaaatggcaaggagggtgggactgaaaattccagtcctccatagggctgccttcgggcacagctggaaccagctgctcacacggacaatgccagcagcccctgatacctccctgtccaggctcctccctcttctgtgttcttttgattctgagccatgtaatggccctggacgttcagaccatccttctcaggactagtggataacatgggcttctctctcccagtccagcaaagtcccaaatgtgtgcctctgtgaaccaacttttctggcccagcccctgaggtcaggtggatgatctatgctggttggttggactaggtcatgagccctcccctggaattagggaggggccctgggtccacagagtggggaaggaggcttccagcaggaaatggaaatgctattcccagcagagtgggacaaagcctgcaaaacacatggtccctgagtgaccaggaccaatgcctgtcctctcaaattccagcccagtgtggggcagggcagatgggtggacaaatcatctcaatgggatgcagtgtatggccaacagagtgtgcacccagtgcagggggcctgcggaagggagagccaaaggcctggggaagacaggcagggagactgaaggattaaagtcttcagaaaagaggcaaacacttaagccaggtcttgaaggttgggtaggagttcaccagggcaaaccaatgagctgggcacagagctaggaagcaccgcaacactggccaggtgttgaatccagacgctgcacctttctcactttctaggcaagtaacttcacttctctgagcctcagtttcctcctctagaaaggagggcatgatgatagtgcctctctccaggagctgatggaggagcaaacaggatgaagtaggaggggattggagcagtggactcagtttcatctttcatggagcttgcattttctcatccataaagtgggcacagtaacagcgccctcctcagtgagttttctaaaggttcagggaatgtatgctcagcgcagtgccaccacgtgctggctgccgactgttaccaccgttaagcagttctgaagatgaggctgagaagtctgggcgggagacgcgggaagcaggcaggctgccagggaggaggcaggtggctgggaggcctggctacatcccaatcccagcactgccctggccgctgtgtggcccactgattgcacctgctgggggagccgctgggggatggaacgggggttcctagtccctcagcagagtgcactttgaaagccttcagtggtggaggaggggagtggtgttcctttggggctctgaggacctgagtgtcaggaggaaggttacccggaactctgctggggacgtggctgtgtgggtgctgatggggaccctgagtccatctcaggccaggatcctgcctcaagggcagggctgtggctacaaaaaccccaaagtcagtagaggctgctgaggcctctggagagtcaccccaaccccttcaggcccaggtgctggtgggtggacgggcgttttgtgagagggcgctgggagggtcagaggacggggccggcacagttctagttctggagctggttggtggttacaaaggtgtcccccaggcagcactcattaagctaaatacgaatgttttgtttcatagcaaaaaaggtaaatatatggggtttattcgaaaggcagcagtgcctcccaccgcccttacattaaaggcagccaaggagtctccaacttagggagcgccaggcccggctcagtctcggcccatcccacttcagccccagcccattttacacaccagaccactgaggctcagagaggccaagcgactcgcccgccgccccacagcggctccagcgctgctgcctgtttacagcgcggggaaccggcggctacacctcccgcccggctgtccctttaacgtttctagggcatccctggaaggcccgggcacggcgctgaggtctccgctcccgctcccgctcgcccgggcgaggctgcggctccgggcgggtcaaggtcgcagcggagcccctcggagcccccgcccggcggagaggccggcctcgcgtggcggcgccgcccccggccctggtcccggtcccgccccgccggcgcctccccgcggccccggctccgctccgcggccctccggcgggatgcgtggccgtggcggggggcgcgcccgctgtcctgcgcccctgcgctcgctgctgggcgccttcggggcccgggacgctgccgccgccgcccgagatcctgcgcaaggtaagcgcgcgctgcggggaggggacgcgggacgtggggcccggggtgcccgccgggcacgaggcgctgggggacgactcctcctgaatcccttgcccttggccgttgcgggtggccgggaggcccgctgcgcccccagccacagaggtgggcgccccgggtctcgggcttaccgcccccctcctccccctcgcagcaaagtcaccagagtctctccctaaacaagggcagtgtccgcagggtcagaagcgctggcgttggggtcgacagtctggggtttggaattcccctctgcccgctgtatgagcctgtgcgcatggcgtttgaccttgctgcgcctcagtttctgcatctgtgaaatgggggatacctgtgtcttgggggcagcagttgggatcgtatggacagcgctggccacccaagggagggctctgtgcttgatcgcccttcttccccagggagggccatgggcctccacccacgtgggactggcccctcgccccctgctgggcagacacctgaccctggagagggtccagctgcagttcaagggatgggatctaggaagaggggcctgaggaatccagaaaatggccagggccccagctgggccagggaagaggagttgaggacggggagtggcctcaggcctcctggtgacaaggctagagttttgcctgtgctcagtggccatgggtgcatgagtaccaggtgtccagcaggcagagcccggagtggggtggaggagagctaggccagtgtttccgcactggcccttggtgaggataccgggggcacttattacagattgttccaggggccccacccaggcctgccccttgcaatctcctgggagaatctgtgtttttaaccaaagcaccaggaaactctg

SEQ ID NO: 21 - DNA, 6000 bp, Homo sapiens
ggtccatcctgctgcttcctcccttgccccacatgtcccttctctgacagcagccagaaggatgctctggagacccaccactgcctcagtggctttccaccatccttggaacaaaatcaggctcttcctgaggtccatgagatgttgcatggtctgggtcatcccctctttgtggctgcagatccttgctctggcctctttgcagggacttcagggctccatgctgctcccacctcatggtcttcgctcaggctgttccctctgcccggggcgcccttcctcccttgcatgtccagttggcttccatttgcccttgcacttccagagcatcacttcttcaaaccaggctccctctctgctccagatgaggcatgctgcactctgtactcattgaaattaattgatcctttgattcatattagtcaatcttgtcttctgtgctagacctcaagctccacaaagccaatgtgcaatcatgtctcattcatggtggtattcctggcaaagtgactgtttgggcacagaatagattcttaggaaatattggatggttggatgcatccattggtctgtacctgctttaagaatgagaccaacttgggaggtgtgtgggggtggaattggtcttggggtaccattcctcaccactccctaatgagcaggggtgcctcatacatgcgctgtgtgttggaggggttctgccatccctgagccacctttgcagtgatgtgctccctggctgcccctgggcagaggaaactgcctttgcctttgcggttttgtgagttttgaaagggacttgggcaatttggactgactctgtcccatctttgtggttcttcagggagcagtgttgggttatcggggctgccctgagtcaggaaatggctttgggttttcggatcaaggagatcaaggggcagaaggggggtccttcgatgagcttctatctgatctagaatctgggtggagacagggagggtttcagtgttgattatgcccaccagggcaagaggcagaacccaatcctccaaattcaaagctcagcctagtgcctctacatgctttttttttttttttaaagctttattgaaagaatttacatatcattaagttcacgcatttaaagtataaaattcagtggtttttagtatatttacagagttatgaaaccatcaccataatctaattttagaacattaagaacatttctagaactcaaaaaagaaacggtacccattagcagtcagcccctctcttctcccactccccatcctcggcgtccacagatctgctttctgattggatggacattgcatataactgggttcatgtggcacgtggccttctgccactggcttcttttacttgcataatgttttccaggttcatctgcatgtgattgtggcacatgtcagtacgtccctccttttcatggctgcatattatcctacagttaggatggaccacattttatttacccatttatcagtccatggacatttaggttgttcgtaattttttggccattatgaagctttgttcattccaatagggtttctgcaatggccttccaaatccaccccttgccagggatcttgttcaggagggacaattggtgactttcacaaaaacctgttgtgggccctcaaggctggaaaccctcctccaaacaggtgcctttcacacaccttggggaccagatcctcacagggctcaagccagtcatggtctggagatgaccgactttgaagtccaaagtctctccggcaggcaatttacccggagaccttattatcttctattggtcagtagaggtgggattgctaactttttttaaatttaaaactatttttagtatggaacatctcaaagccaaagaataatataaggaaaagctccagctctacctacctttaacaaaccacagtgctttgctaaaatatatacttctaagaaataaaacttggttgcatctcatcttctgcttccccactccatgtgggctcctgagctcaaatgccaagtcttatccttttatatgtttttaaccctcatccatacacagtttggtggagtaggtgaatgggtgctgctgtgtagaccatctgaagggactagggataatttttggtggtgcacggacaaggcaggaacattggcttagatagaaagttccttccattctttgtccttatggtaacattaaggaggatgtctctattcggtgcctgcctggctgaactcctctctcacccttgggccctttttaaccacacaggagacagctcaggccaagagtggactcaggtattgagttagtgccgtggtcccccccaccaatgccagccagcgaggctgtgctccatcagtcctattgaaggcttcctttaacatgcatgtcggcccggtgtggaggtgcacactgtactcccaagtactaggaaggctgaggtgggatgattgtttgagcccaggagtttgaggctgtagtgcactatgattgcccccgtgaatagccactgcactccagcctggaaaacagagcaaaactctttcaaaaaaaaaaaaaaaagagagagagagagaaaagaaaaaatatgtttaagtgcaaagagttgatttaaagacaaatcttaagggatggaaggataggttttaaatagggaaggctaaaaatcatagggatggttggcaaatgacagacagctggagacctctggtgtgatctttctcctcccccccacctatagccagtctctgggctctatcccttcctgcccatccccaccatttctgcacctgccgtggctgggtcagctgcaggcttccttccaatggaactgaactgtctcaggtgttcactcacccagactcggaaggggcccaaggcatggttgggggcaaggattcagaaaccttcccatggggccagtactcagtgtgtcaggacagcccctggggacttggagtgggaggtgttgaagacccacttggagagaccctgggccaagagcattggctgtggcccagctcttccacgtgctggcttgtaacctgggcaagagtgctcacctcttgaagttgccttcatctcaaaagtggagaccacagtagctctcacctaccagggcagttgtaggaaggaatgaggtccccatgcaaaatgctcagtccaaggctggcaggccacttcaccatccagccagcacatttttatgtggataaaacgtatctattcctagcagtttcccaccagtttcctctttgtttcctgatcttaattgccaactgtaattaaatgattatttgggcatcttattagtgtgttggtgaccattctcggcttcaccctccccctttcccggaagactcaaggagttggggcgtctctgtgtttgtgcactgctaggtccctaatgcctggtgtggtgcctggcacacactcgactctgcacacagtctgaatgaatgaatgagtcctttctttagaggtgactgatgctgctgaaataactgctgctaagagcccaaagctctgtgtggagtgaacatccactttattccccctccccaccaccaccccgctcagttctgtccttggcgcttaaccgggatttcgtccacactgccagcgctcacactgcactcccaggccctgctgtaggtgctaatctgatgggggcagccttagggagggctctgtccccagcaggaggacccttggtgagcgactctccccgcttgcccccaccccttccagcacctgcaaagggggcttagagcggggctgccccatggggttgagaaattgaaatgggggtgtcctcccccaggtgtctctgtggtccttgaatcctggtgtctgttgaaatgcctcctcctctgggcaccttccaggaccaggccaggtgacaccaccattccacccccgtctctacccctttcctggactttcttccttccctgccctggctggggaagcagcggctgcctgcctgtgttcaccccacaccaccgctggggttgtgagaatcgctccttagcaccctggaggacacctctgtgagtggcagccctggggggtgtcgcctcccttgcctggcccctcaggttcctaagggcgtctgaggaaaagcctcattggaaagcgcccgtgccctcctccctctcccccgcccccccgccccccggcagggaggagggttcggagcgagggttcggagggtccggggtgccctagcaggcccaggccaggtggttgcggggaggaagcctcaggtcgctcccctccggtgccggggtgggcgcgtcgggacccactggcctcccagtcccaggagaggaaggaccagggaaaccagctgtctgcagctgctggggaaattaggggctctcagggttccctttcctccgggaggggaggaaacgggactaggaagctttcctgtttctagagcacggcttggtggggtgggcggctcctaacccggggtccagcccctcctcccccaccccggcgcgcggtccaggtatgtgcgacccctcccagtggccacgcgccttctcacgcccctctcccgtgacgtcatgctcctctcgcgcggcatgatgggagaatcctaatgttttccaacagatgctccaagaacagctttcagattaaagcaattgcaagagcaaagattcttccttttcccttttttcctgggggggtggggggtggggtggggggagggagcgcccccagacattccaggacatcaccccctgccccaagcacgcaataaacactgacaagaaaaagtttttatttcctggttcaacttttttttttttccctggaatatagactgaagaatgggaataaacacgaataaataacaaagcgaggccgcgcacgccgggatgcgcctggctgcagccggcgaggctattgtctccccgccctgaagccagccccggcgtctttctccagctcgtttcctttcccggccttttttttttttttttttttttaattttcttttttaaaaagacgccccctccagccccctcgccggtgaccttggccgcctcggatgctctgattccacgcggctcgctctaacttgcccccgcgccggccgggcccatggccgcgtcggaggacgggagcggctgcctcgtgtcgcggggccgctcgcagagtgaccccagcgtcctcaccgactcctcggccacctcctccgcggacgccggggagaacccaggtaacgggctgggcgggggcggcgggcgggtcggggaggcccgaggcaggtggcgctgagagcaggaccccgcgaggctccgcgccccgcctgcattcggggagccgcggcaggaacccgcgctcggccccgcggttcctatccccagtctcgcagggctggggcgcctcggagccctttgtccataaaagagctgatttcctgggtagagccgggcgctgcagcttcccctcctctccggctggtgagctctgccgtcccctcgaaggaggcttcctttcctcgggtgctgaccggctgggggaagagaggcagacccgtggccgcctccgcccagcgccggttctgggccattccctccctccccactgccgggccccagctccggacgtccccgcttgggcatctgctcctggaaggcagcgctccgcagctgaggccaccgcgctgagggcttccaccaggcgcctgactccagcggggcctggcgcacctgggcgcgctagcccccggacaggtgtgctgggcagagccgccggcagggagacgaagggcgtgcgccaggacagagcccggtttcgtgacagcgtgtggactccgtccactcttccacccccatggcagcgttgattgtttaggtgataaaccggtcacaaaggcgtctatagggcttgattgattactttccagagaggaagaaaggcctaataaagcggggggggaggtgggggggggggtgggctgtgtg

SEQ ID NO: 22 - DNA, 6000 bp, Homo sapiens
ccagcagctggcttccctgagaactcaacaatgccttttcctgagggccttcctcgatcatccacaatgactacagccctctctacctggccaaacacagaaaaggcttcttccagcacttcgttggacacatactgaggaaggtttcgaactgtaagggatgcactatggcaggaaaagcgcacacgcagctgctttccacagagtggcatattgtccagctccactttcgcaatctccgctagggttcgtgtttccaagcggataaagccaaatccttaatccttatgaatgaagacttcgcctgcctttccatatttctcaaatagtttcctcatttcttcctcagtgatgtcgggaggaagatttcccacaaaaagacggcttcgttgggtgaaggtcttctctcctggttttctaaaattcttcaggccaaatagtcaaagccttcattttggctgctggcctgttgcccatttgcaggtattggcggtggtggcggctgcagctgttgctgctggtggtgatgttgatgatgctttcttggagtatggttttgcttctccaagttaaaagttttattactctgcatttttgcaccctcaacttcgattgaagacagcaaagtgcctcccacttccctctaacctggacttctcctctaccgactggtctctcctcggagtaacggcgacgctacacggcctctcccgtcccgagaaaagcttttttttgttttgttttgttttgagacggagtcttgctctgtcgcccagtctggagtgcagtggcgcgatctcaactcactgcaagctccccctcccgggttcacgccattcccctgcctcggccacccaagtagctgggactacaggcgcccgccaccatgcccgactttttttgtatttttagtagagacaggatttcaccgtattagccaggatggtctcgatctcctgacctcgtggtccacccgcctcggcctcccaaagtgctgggattacaggcgtgagccaccgcgcccggccaagataggtactgttttacagacaagggatagctaactaaagccactaggtgtagctgacatggtcagtaagtggtgaaaataacgtaacacccagacaaactgattcagagccacttttttctctcttctcttcttttttctttcctttccttttctctctctctctttctttctttctttcttttttttttttttgagacacggtctctctctgttgcccaggctggtgtgcagtggcatgatcatagttcactgcaaccttgaactcccaggctcaagtgagcctcctacctcagcctctcgagtagctggcaccacaggcccacaccaccatgcccagctagttttttcatttttacttttgtagagatgagagtctcatcatgttgcccaggctggtctgaaactcccaggttcaagcagtcctttagccttggcctcccaaagtgctgggattacaggtgtgagacacggtgctgtccctgagccacctaattatccattctgttatactgactgctgcttatgtgccttcacttcattttgagcaacgtggggccagagtctgtctaatttgtcttaatagtctcaccccacctccctaagcaacacacataatttggtagcaaataattccttgctgaattgaacagaaggtgtatttagtgacttctacgtttccttgcaaatctgaaattttatgattataagatccggtgaattttgctgaatgtcgacttgggtcttcatgcaaactttcttcatgaagtcttcacgccagctggattcctcaattgtcatttatctgtcctaccccaaaaatccttcagtgctactgaatattgcctttcagcaattacccaaattcagtctttctctttttttggggtggcgggaaggggactgagttttgctctcgtcgcccaggctggagcacagtggtgcgatctcagctcactgccacctctgcctcccaggttcaacaattctcctgcctcagcctcctgtgtagctgagattatgggtgcccgccaccacgcctggctaatttttgtatttttagtacagatggggtttcaccatattggccagatggtctcgaactcctgatgtacggtgatccacctgccttggcctcccaaagtgctagaattacaggcgtgagccattgcacctggctcaacctttctcaccactcagtctcttcattatctagaacgtgcctgtgctacctgccgtaacagagtatggctggaggctatttctcattttctagtttatcatatcaattttttttttttgagacagagtctcaccctgtcatccaggctggagtccagtgtgcaatcttggctcactgcaacctccgcctcccaggttcaagcgattctcaagcctcaggctcctgattagctgggactacgggtgtgtgccaccatgcccagctaatatttgtattttttgtagagatgggttttcaccatgttgcccagtctgatctcgagcccctgacagtctgatctgcccgccttggcctcccaaagtactgggattacaggtgccagccaccgcaccctgtcagattttattcttttaatgtgcagtgtgtgctctttgcttgtcccttctcccctttggtgaacacttactcagatgccactaaatcttttctgcagggttgttaaaaaaaagcaacaaaagataaaaaatgaaatatgaaagaagaaaacaaaccgaaaccaacaaatgctagtaagtcaaggaaatagtctctaatttatctagaacagaattagtaaaactgccatcaatggaactggagaagttttagttatagtagttttataaatgagactaatatagggtttaatgtacaaagacaggactgtatctccttgaaagttaatctcttggatttggagtggtactacaaaaagtagagactaagtgttcaacctatttatttatttagatacagagtctcactctgtcgcccaggctggagtgcagaggcgttatcatggctcactgccacctccgcctcccgggttcaagcaattctcctgcctcaggttctggagtacctgggattacccgcacccggaccatgcccggcgaatcttttttttttttttttttgtagttttagtagagatggggtttcaccaggttggccaagtgggtttcgaactcccgacctcaggtaatccacctgcctctgcctcccaaagtgctgggattacaggcgtgagcctccacgccccaccagccaatttaatttgtatgcatgatagaatccatcccaattcgaagacccaaaaataacagattagtacaagtctttgaggctaattacgtcattagtattaattttaatcaatggtgattaaactgagccttcattcaacttgtccagaacatcagtcaagaatgtctatttaaaatgttcttggaggccgggcgcattggctcacgcctataatctgagcactttgggaggccaaggcaggtggatcatctgaggttaggagtttgagaccagcctggccaacatggtgaaaccccatctctattaaaaatacaaaaattagccaggcatggtggtgggtgcctgtagtcccagctactcaggaggctgaggaaggagaattgcttgaacctgggaggcagaggttgcagtgagccaagattgagccactgcactcctgcctgggctacaagagtgaaactctgtctcaagcaagcaaataaataaataaataaataaataaataaagttattgggcaggcacagtggcattcgcctgtagtctcagctacttgggaggctgaagcaagaggactgcttgaagctgggagttcgagcccagccaaagcaacctatccagacccatctcttaaaaaaaatatttctctgccaggtgcggtggttcatgcctgtaatcccagcactttgggaggccaaggtgggcggatcatttgaagtcaggtgttcgagaccagactggtcaacatggaggaaccctgtctctactaaaaatgcaaaaattagccaggcgtggtggtgcacgcctgtaatcccagctactcgggaggctgaggcaggagaattgcatgaaccggcgagacggaggttgcagtcagctgagactgcaccactgcactccagcctgggcgacagagcgaggctccatctcaaaaaaaaaaaaaaaaatatcatctatctatccacctacctacctacctacctacctggattataattcattaagttctctgtgccctgtagttgtagattaagggaatgcgattggattagtgtggaggggctttttatggagccaagcaggagtttttaagcttttgtacttttgcttcatgtcacaaggacagatgccccacaaaggctgagatgtttgtggtcctggatcttagaacagtgcctggcacataataggcataaggttgccaggaaatagaaatacagatactcaattcaatttgatcttcagataatcaaaaaatactttttttagtataaatatgtcccattctgtatttgggacatacatattacactgttgtttatctgaaattcaaatttaagtgggtgtcctgtactttatctggcaaccctactaaaggagctcaattaagtatttgctgacttaacagtctgaaggtctcgtttcacctgtaaaatggggctagtacctgtccctgcctctataaggttgatgggcagagtaggtggcattcagtgagccctcaatttatttgattgcctgggaccatccggtgagcagaaacccttccactttcaactacagagacgataaaaaggcctcctcgaggccagaggtgcccaggccaggcctaggtggcccgcacctgcgagcctggccagcctcttccgggtcaggtgaccgcgcgcggtcacgtgacccggcccgagtgcgggcggtggaaggcggaagtaggagaggagttcggcgccgcttctgtggccacggcaggtagcgagcgctggcgcggggggcgcggtgggctggctgcctgcacggggcgggccgggggcggcgggcggcgcggggtgggccgggggcggcgcggcccgggcgtcggggggcggcggcttcctgtgggaggggcctggcgcggcggttccggcctccgaggaggggtgtcccggctcccgcccgagtggggtgggcgcgccgcggcccgcgcgggggttgctccgaaatgggtgccccggccgccaagggtgcagctggagcgagtcctcccggaaggggagaggagcttaggttcccaggcatggagaggagcgatctttgtggagggatcgggaccaggggaaggggcgacttggaactgagctggaagggggtgcctgaaaatgggtttatggcgtggagccagagggaaaaagatgctgcctggaccccctctgagagtctctcccttccttcctgtttggaaatgattgttacccgagactttgatgacggtcccattcagtttttaaacttcaggagggatcacagaatcttgatcgtcttgcttccctcgcgcccacttagtcctgcgtgggtagggtttccacttcttgggagcctagcccttcagctcatttttctttgagattttccctgaacgggccatcatcgaggctttaaaaaacaaaaaaagaaaataaattaaaaaaataagtgtgggcactttgcctgtaaaatggcttttagcttacactgttgacctagcccagcgttacctcagcaacatagtgactgctgaaatcttggacagagaagtgtctacctagactgctttatgacttttctctttcttccgtttaaattattcagtttcccttagcttatcttgtgactgcttatcttgacgaactgtaactaggtagggtgcctgagaggtctgtgttatgttccttagaactgtgacctgga

SEQ ID NO: 23 - DNA, 6000 bp, Homo sapiens; identical to SEQ ID NO: 22

SEQ ID NO: 24 - DNA, 6000 bp, Homo sapiens
gaagctgggactacacctctcgggcagaggagtgtggggacagaatgcgtaggctacaaggctccctctggggcagagtcgggggtggctgggcagtaggaagccaaggcaggttgttgcaacagtcaagaagaaaggtgatgaggccagaggtggtggccagagagatgaggaaattcctcctcaccaggatggctgcagggtgatacagtcctggccactcacagacagcatggatgcaggaagacagaccacagacccacaacaacgaaggtgcgtgccggtgtgggcaggactcagccttccagcacttcaagacgggcccatgacaagcattctgtccttctgacaaaccttccccataaggaaaaggcagaaggaccaactgaccttcacagatgctgccacttaccaggcactgtgcagggtgctttagaggtgctagttcacttaatcctcccctttcagagctgaggaaactaaggctcagagagagaaattaaagtgtcccaggtcagccaattcaggaagtgggtgcatccagggaggctggtttcacttcccctggcctggtgccctgagtgccccaccccttggcatctgagcagtgtggctcccatgccaactctacaggaatgtcatgtctgggggcaagtggccccttgcaggggcatctgctgtgcaggtccaggaaggtaaataaagttcactgaatacaagatccccccatcccagcaggagtccagcttggcctctcccatactgtccaggcagatgttggagggaagaaaagaggcctggcctcctgttggtttctgcctcctcacctctgcccagcccactttcttctctcaaaggcctcagcaaggccaatgggaggccaaggtcaaggagacggggtgagaacaagaggcagcccgcatggacaggacaggagcgcagtgcagttgagcaccttctttttctttttttttttttttgagatggagtctcgctctgtcagccaggctgctggagtgccgtggtgcaatcttgggacactgcaacctccacctcccaggttcaagtgattctcctgcctcagcctcctgagtagttggaactatgggagtgcgccatcacatctgcctaatttttgtatttttagtacagacagattttcaccatgttggccaggctggttctcgaactcttgatctcaggtgatccacctgccttggcctcccaaagtgctgggattacaggcatgagccactgtgtcctgcctttatttatttatttatttatttatttttgagacggagtctcgctctgtcgcccagtctggagtgcagtggcaccatctcggctcactgcaagctccacctcctgggttcatgccattctcctgcctcagcctcccgcgtagctgggactacaggcgcccacgaccacactctgctaattttttgtatttttaataaagatagggtttcaccgtgttagccaggatggtctcgatctcctgacctcgtgatcctcctgcctcggcctcccaaagtgctgggatcacaggtgtgagccaccgtgcccggcctttttttttttaaagacagggtcttgctctgtcacctaggctggagtgcagtgttcgatcatagctcactgcagcctctgattcctaggctcaagggatccttttgcctcagcctctcgagtagctgggactataggcaccactggcttggctaattttttatttttttatagagatggggtcttgctatgtcgcccagggaactcctgggcttaagcaatgctctcacctcggcctcctaatgcgttggcattacaggcgtgagccactgcacccaacccagaatctgagttttcatcagaacttagctgtgacctctctctctcttcctcatgccatttcttgcaagtggattcttataagaaccttcattcaaaccctctcataaacatctctatcactgtctctcccactcagttgacagaatgaacaccttctcggcagcttccagcttccaggtcctccttggccccatttctttccctagagacccaggggacccgacctccctgcctgcctgtgccacctcacaggccccacgtccagctgcgtgcacaagctcctctctctcaatgcttcggaggctcccagcgcccacttcaagaggcttctctgggtctgctctcggttgccaccttcgtcccttcccaccactaacctttcccacccagggcttggaccttgctagcaagctgaacgtgccctgccttctctagccctgctatctgctctgctgggaacactcctcagtggaaatgcttccaggaccatctcaaaaaccattgctccagtgaggcctttccttgggtcccccaaacagccaaacaggttcttgctctgaaactttatctgtcccagtgagtaaccctaccagactggctcctcaagggctgagacccacagcagctattaatgagttttcttagacaagtattctgaagtctggcagttctattagaaattctggccgggcgtggtggctcacgcctgtaatcccagcactttgggaggccgaggcaggtggatcacctgaggtcgggagttcaagaccagcctgaccaaccccgtctctactaaaaatacaaaattagccgggcatggtggcacacacctgtgccaaccagctactcgggaggctgagacagaagactcgcttgaacctgggagggggaggttgcagtgagctgagatcacgccattgcacttcagcctaggcaacaagggtgaaactccatctcaaaaaaaaaaaaaagttgccgggcgcagtggcttatgcctgtaatcctagcactttgggaggccaagggggggtggatcacgaggtcaggggatcgagatcatcctggctaacatggtgaaaccccatctccactaaaaatacaaaaaattagccgagtgtggtggtgggcacccgtagtcccagctatttgggatgctgaggcaggagaatggcgtgaacccgggaagcggagcttgcagcgagctgagatcgcaccactgcactccagcctgggcgacagagcaagactccatctcaaaaaaaaagttctttcagccaggcatggtggctcacgcctgtactcccagcacactgagaggctgaggcaggcaaatcatttgccttaattgatttgcccacctcgtcttcccaaagtgctgggattacaggcgtgagccgccatgcctggccagaagttcttcctagaggttctatgctgtcctagcaagaattggtaagaacagcatagaacacaaggggttgcaaatttgtgggccgtagaccaaatctgttccacaagtgacaagatgttttttaattgaggtaaaatgtgcataccataaaattagccgttttaaagcaaacaattcaatgacatttgtatattcataacgttgtgcaaccaccacctctgtcaggctccaaaacattttcctcatcccagaaggaaaccctatgcttgttaggcaatcactctgcctttctctctccccacagcctctggctctaatctgctttctgtttgtctggatttacttattataaatggcatcattaacacatgtgggctttgtgtctggtttctttcacttgccatgttttggaggtttatccatgttgtagcaggtatcatcagtgtttcattcctctttttcttttcttttctttctttttttttttgagacaggcttacgccatcatccaggctggagtgtagtggcacaatctccgttcattgcaactctgcctcctgggttcaagcaattctcctaccttagcctcccgagtagctgggattacaggctcgctccaccatgcctggctaatgtttggtgtttttggtagagatagaatttcgccatgttggccaggctggtctcaaactcctgacctcaagtgagccgcctgcctcggcctcccaaaatgctaggattacaggggtgagccaccacatcaggtctttttttttttaagatagagatggagttttgtgagttgcccaggctgttcctgaactcctggcctccaaaagtgctgggagagttcagacatgagtcatcacatggcgttcatttcttttttatggctgaataatattccactgaatggatctaccattgtttgcttacaccctcatcaattgttagtttgggctgtttccaccttttggctctttgactattgtgactagtactgccaagaacattacttgtttgaggactataattgccggatcatatggtaactctatgcttaacttttgaattagaaacggtgttttaatttttcgaatatgactcctttacgtgtctgtgtctgtttccatgtcttcctactgtcttagtaggaagctcacgactcatttgcgtaatttttctggcccctgaaggcacctgattttgctgcccctagaatactttggaggcaaaaagaaaataactctgtgcccaattcagccagagtcgtggggtaaaatcttttcacttctcaaagtactactgtggttcatccccaaaggggggaaatcaggttttccggagaggaggcggctacaattagggaggtgagggacctcacgcgcctcttccttagaggaggcgggcgaggcgaacggcggaggaggagaagcgggggcgctgtgcgctctctggggcgtgggccgcgctcggggctgcccacccctcgggaacgagccggggcgctcaaggaggcagcgacgcgaggcgcagccggtccaggtttcgcccgccaccgccgtgcggcgcctctgcgggtcagggccgggggcgcggtcggggccgggcggggcccaggttggctcgcgggtaggcggccccgccccccacatccgggggccggggccgggctgtgggcttgccgcgcgccggtgagtcaggccgggttttccctccgcctttggggcaggcgatcgagcgccgcggagcgcgtccctccctcgccaatccggctccggcgccggcgcccgcccgcgttttcccggcgcctgccgctccgccgctccgacccggcacgcagtcccggcccgagccgacgccttgcaggagggttcaaatccgcgcgggggagctgcgacgcgcaagggctgcggagccgcgggccggcgagcgcgtcgccaccatggtaagtggggcgcgcgaggggctggggacccgggctggactcggggggtggggaggggtggggcgggtcgccaaggtcttgttttcgggcgtccttggcaaagctgctgtcccgctggccgaggctcccgtctgagagatgggcgggggtggcaaggtgcggcgtgcgcccaggtgtcccctgctcccggtcaccgaggcaccggatcggggaccgaccccgatgctccgctggaggggcaggcggcaggctaccttgctctccccaacccctgcaaacgcgctttccagggagcagcgcgcgggacccctgcgccacggctgggtggggcaggcgtccttggcgccggcgtctgacctcggcctccgccccccggcccagccgctcccggcaggcctcagggaggggccaggaggagacgcgcctcccaccccgccccccaggtagctccgggacctcccgcagctttggggaaccctcgccttcacccctgctttcctgacacaaattccgtggggatgcaacctcgtttgcccctctgacttccccatgagatctctcgcttcctcccacacctcctttatcccccaaccccctgccggtccaccaggctgcagctgcgggtctgcgggtaggggacattcctaggtcttgaccgccagagcacccggtccagtcccggccacagcctttggcccaagtgagggctggcctggggacaagccgaaatcagggccctggctgtatccagaaagagaactgagacccgttgcctcccactggg

SEQ ID NO: 25 - DNA, 6000 bp, Homo sapiens
agtataaggtgttaaaagcccaagaagaaggtaacagttctagaaggaggaaaaacagtttcttcgatttaggaaggaaaatgattgacttgaacagaggtggacaacccagcatgcttgccctgggaatcattcaccaagagactgttaccgtggagtcaacaagggcctggattccaactccagctccctattggacaagctctgaacctgagtttctgcatttgtaaaatcaagataatagtgtgaacttcacaaggtttttgtgaaggttttgtgagacgatattagggtttcctctctttcttagatcatctaacttggctcttcatcattactaggccatcatctttgcttgtaccactcccctttcctgagtatcctcttcattcttttcagtcattcccttccctccttcagaactgattttatccaagagatctaaccccaggctaatcatttcttatttccatattctcctagaccaaattcatctaatctgttagcctatctagtttataatgcattattctgtattcatttatgagtagcatttgtggctttgtaattgtcttttattttcgtgatttgtctttaaggttaaatagtaaattcctcaaggacaactgtatcttctacttttctgtttgcattctgtgttcttatgtgcctattatactacagcatcaaggtagatattccctaatagaaagagatagcggctgctaatgaccactgctgtcttgggtcaccacacatgagcctccttatgtattccccctagatgagtaataggaatcagaaaacttgctgctgtccctaagtgaacccagcagaggataaaagtgaattataagtaacatttgtactttaaagcttatatgttttaaccctttcaacaactctatgaggtatgtgatattattttcatgttatagatgagaaaatggaagttcagagtcatgtctaaggtcacacaggtagaaggtagcaaagatggtgttcaggcatgggtttgccacctccaggtctactgtttctactgagccagggttgctgtgcactgggtcactggagggtgttggactaactgcattcctgaaacttgtctggttgtggcttaccacccttggatttagagctggattgatctggtcaagtggcaggattaggagaaaaaatactagttgactatagaagtatggacctatgcagtatgtatgtggatgtgaagatatgctatagaatatcatgtatatactataagtacaatgtatttctactatatagtgttaaattaagattgactaaaaatactaacatggtagtctactaagtagatatttaaattatgttctattatgtatttccctccatttctaacctatttttttaactttcacttttctaaacaaaaaattaatcatattatccaaagcaatagataatttgttctcttcaaaatagagctgattgaaggatagaagagatctaaaggtgaaagaagaaagtgattttaccagcaggcccaggagggtcgagcccagtgaggctcgatcactgcatctctctcctgataatgaggtcacatgtcccaggctgtatgccactggagcttccatagtggcatactctgcccccgtccaattttaatactgctgacagaggctggcaatgatcagaaaaagaaccaggccttgtttgataggtctaaggagctactagcccagtttaaaagccacccaacacctactgaacagctaagaacataggcagccaagaaatgacccggatactgaggccccaggttggatttaaagtgctccaggtcactgctgtagaaattatggtgctcccagtctccatccttcctccactgaaggaggttggactgatgttgacccaaatttgagattcagatcttggagcaccattatgtcctgagaaaagagtatagctttggagtgcaaaagctctgggttcaaattttagctctgggaccccaggcaagttacttggcatctagatcttggagttataaatttgtaaaatgagaataatgtcatgcacagaggattattgtggagattttactaattgtgtaaagcacctggcagagagaaaagacttgatacacgctggtctccctctgcttctccagcacacaccctaatcactgttcctaaattagcctggcagaggagggtctggtcttggtgaagcccagtctcaaccaacgaggtggctctgctgcagaggcacacctgatggcaagctatgggagtacttatagcataaaaacttatttgacatggatcagatctttaccagatttgtatttaataggttagaattacagtctgagagaggagaaatgagaggaagaatggaaaagctaataaatggttataaattagaacctctgagagaacttaaagaaattgtcttttacttggagaaaagaagattgaaagcaatttaacaactcttcaagacaatgcatgaaggataatcagcaggataatggccctaatccctaaggccagaaaaagaggaacgagttgaatttgcattagagagggagggagatagattaaatttaaggcgaaatttctctagaagaatattattaaacagtgggataggtgaccgcagaagcctatggaattttctttcatggaactccataaaaacagagagcccctgtttggtttgtgagaggtactgaccctgttccagaaatctgaggtagaggggcaggagggaaaggggatggagaatatcgcagagatagttcttgagccctggaaaatacaagttaaagcacttggaaggctttcagggaaaagaagcaacattcatctttgactaggaaacagaatctgaatgctaatgcaagagagaacatgcggggtggggagaaggtgcgggcaaaggggaggaaaggaggcgatccattttgtttccacattgcaggcaccactccactcctagtggagcaatcctaaatttctttctgtgggcctcagtttccttttctgtaatatcaagcgcttagattaagcactctcttgagtctcatccaatcctgaatttgtgtttataaaaccgatccagagagtgtgagtaaatctgtgaacagctacttcagccccgaacccagtggtgttgagtggactggtcctgcacagagggacaatgcacctgcatgggcaaaaactggggctgggccagagtcatgggcttcaatccctgcttttcagccactagcaagttgttcatcttctctgaacttcaatatcttcattcgtaaaatgtggacagtaatagctcctttggccgtttcgagtttaaattagataatgcaagtagaagacatagtacaataatatctaataactaccatgttcaggaatataagtaccaataaaatggtacctattgtattaatagcatttgagtgagaatttttaagtctttttatttctcatcttttcatttctacctttattggatttgtagaatctattacagtcaaatcatatagtttggtgttgtggtggtgatgttttttgtttgctttttaacacacttgcctttacttgttttggcagaagggatcctaattcattcagctttctcgaatgtcatataaaaacacataacacatgttcacgttcctagttgtttctacatattctctgctcttttagatgtgtaatatagaaccaagtaattatttagcagttccggtggctttgcatcattttggcattcataccaagcccccgttactgagatctttgctgcccctctttaacatggtcagtcggggttcctcggtattctgttgacgtcaccattttagctacccttctctgcatattgacctatccctttgcaacttcatattgtcactttcaacagtgtttccaacttaaaaccccctatttgactcttcaaaaggctagactccccatccccagtttgacaccgacaggcaggctgtgggatgtgcaccaggttgatacagaacccagctccaccaagctgaaagggcgcgtcgcccgggccagggtggggcaccaggttatgagtggcctcctgccttttgggtttgcttccccgcaggggacaccgtaggcggctgtgcggtccggccactgccccccgcccctcgcgtccggccgcgccgtgggttgcggtctccgtgggggtggcagctcctgtccgggaggtttgcgcctggcggggcaccccagagccgcgaagagccggtaggcgaggccagggcggggtggggcgcgtccaggcggggagggcaaactcgggcagcgcagggggcgcagagggcagcgggcgggcggacgcgcggcggaggcgcgagcgggacgagggctggctagtgccggggccgcccgcccgagggggaggaggctgtgctgcccttgctgcaggttcgctgtcgagcgcacaggaggcagggacatgggtagggtgcggtctgcgcggggcccgagcccggatctcttccatttcccctctcactcggccccgggctgcgccgcagacggcagcagctcccgctccgcccgagccgcctgaccgccgggccggggtgctaaccgcggggccctgcagcccgccggcccggccagcccagcccagcccggcggcccgcagccccgccgcccgccgccccccgccgccgccgcgttgccaaaacaaacgggccggcctatttattggcggccggcgagcccggcagctcagagtcgaggcgccgagggggacagcgcgccgccaccagctcgggccctgggcccccgccccgcacttgagtcccgccggccctggccgcaccacgccgcccatggcgcccccgcctggagccccccggagccacccggacgcctgagcccccgcagcgctcccgtcgacgcgcctgcccatcagcccaccaggagacctcgcccgccgctcccccgggctccccggccatgtctcccgcccggctccggccccgactgcacttctgcctggtcctgttgctgctgctggtggtgccggcggcatggggctgcgggccgggtcgggtggtgggcagccgccggcgaccgccacgcaaactcgtgccgctcgcctacaagcagttcagccccaatgtgcccgagaagaccctgggcgccagcggacgctatgaaggcaagatcgctcgcagctccgagcgcttcaaggagctcacccccaattacaatccagacatcatcttcaaggacgaggagaacacaggcgccgaccgcctcatgacccaggtgagcgcgatccgccctaccagcgcgccgccaccgaagcacggccacctgcccggccctacccaccccctggcacattttctcgactggctggcacgctccctggcacctgcccctctcgccaagccccgctgcctcctgcccaagatgggctggccaggggtccaggcaggagtgtcggcatccccaagcccggaggagactgctagaagagctccccgctgccaagccccacagcccagcaggttggcggcggctcctctgccccaaagtactggcagctcagccagacgctgcacccggaggtacctctacccggctgcctcctgcgcctccaggacccacgcagtccctcccggcctaaccttctgcacagctgtgcccctttcattttgaaacttttcggcacccctgaggcaaagaatctctgggtgcgtagggtcaccacggcctttcctccctgtgcgctcttggttctacgggctgccccttccaggagcagcgtcccggctgggtctggggttaagaacagcgaggaagagttgaatcgggaggcggaggtgggaaaaggaacctgcccagcgagcccacgtgtctgtccggagagctgaggggtgctactgcggtggaagggtgggttattggggccttcgggctctgggactgagcttaggggattcctggg

SEQ ID NO: 26 - DNA, 6000 bp, Homo sapiens
atttaatctttctctcaagaaaccctctctctaattctgactcttcagcctcacagattcccatttaaggacacttatgatttcactgggctcacctggataatcgcagtatctcaaagtcagttgattaaccatcttaattccatctaaaaccttaattccactttgccatggaacctaacataatcacaggttctggattaggaggtcgtcatttttaaggtgatgaaattattctgcctactacacgcattcgtagcgaaattagttaacagatagtatattataatcctctctataaattgtgaactagttcaagaacagtaatattcttttactaagtgcagaataaccgcatatcatgcccaagggcacagaacatgctaaatgtgaaaaaagaacatttgatatttaaggtcagcagatttcccaagggtagactgccctatcaagtactttggattatagtcctaaaatgtccatttttcctaattatattattacattgcaaatcttgtccttgtttagtaatttacaatatcccattaatttttacacactttatatgttaaaattgagacagtcttaaaggatctaatggaaggtaatcgtttaattaagggatctaatgtaaggcacagaggctagtgcataataaatgctaaataaaaaaacattatttgtaatagctttttagatatggcagctgtttttcaggaagtccagtgagatacagaaatgacctgtccagtattatgccatgggtagaagaattgggaactccaaacctatgcatctttcacaaagagtgaaagctttccataggaactaatttttttaaaaagcaatacttttctatatcattaaacccaaaaatataattgattcagttcataattaattctatatttggcactataagaggagatgaaaatgcctccaataggctttgttatagtctactttgaatgaaatcttccatagtatcaaaaataaaagtcctttacggagaattgggaaaggtgatttgttcttgcctgaataatgattatataaatatatagatgtatgcttctttctttacagtcttgaaatctgtgggagccacaactcaaattgactcatcaaatgccacagggactgtgaacagaaatattttgaaagatattacctgaagggttttgctctgagcccagttatgagcagacaggcttggtctatgccttctcaatgtattctaagaatttatgacagctcaggggcttaaaatatcagcacatttggtagtgcagatactctattaattctaaaacaatacatattaaagaaatgcttgtatgaaagcaagattattttagttacctattcgtacatattttttgtggattaagataatttttaatgccatgattatatagtttcaccaaatattgaacatattacaggagcacttcactttgtcaattcataaaaatatatttaaggaatacacggtcaggtgtggtagctcatgtctgttctcctagcactttgggaggccaaggtgggtggatcgagaccaggagtaaagcagttcaagaacagcctgaaaaaaatggtgaaaccctgtctctatcaaaaaatacaaaaattacccaggcatggcggtgcatgcctgtagtcccagctactcgggaggctgaggtgagaggatcgtttcagcctgggaagtcgaggctgcaatgagctgaaattgtgccacactccagcctgggtgacagagtgacaccctgcctcaaatatatatgtgtgcgtgtgtatggggggcggggtgtattttaaggagtacaaatttatataaaaattgaaacaaaaaatcaaacatgaacaattttttttaatctttgttaaatctgcctacttcatattcattagtgtgagtaatcaagaattaactgttcacacagattatttttcttattctgacccactctatatgttcttcaatttaggattattccaaactccttctacctcttggttatgtgagttggattccttctttagatgtctctcattcaagagcagtttaaatagtgggactgatttttttggttggggagatggttgcctgagtatcttacctttaagtccttagagtcctttcccagtcttaggccaacttcccatatttgttctccttttcttcgtaactaaatgctagggactgtttattctccttctaccaactctgctgccactcagtctaccttgggattcctcttaaaactagtggtcaggtgagatgggacttattatgttcccctaagtatcccctagctcaggactcttacattacaaaggccccaaaattttaagaaagatcttccaggcttcagtctcaatctttcctctttccgaattttctatttttccaggtcaggctaactgattggattgattgggttttagcaaggaagcttgagggtgaagtagttctttttaagtatcctctctcaaggagatcatttgtatttctggctggacttatagaacaatgcttttcaactgatttcatgtgatcagacacagaaaataatggtatctttatggcatacatggtgtcacagaaaagactgtggctatccatgcctgcaggctatgggttctctgggccctaccctgctactctgaagaaataaacatctcaggccaactgtaacctgttttcagtggatttccctttctcacctttggggagctgtaatttaaataaagaaggtaactagctccaggtgcctccctggaatagaagcccccttggactacttatttttttgctgggatatggaaattagacaagtgttcctactggttcatgttgccctttgaagtttcagtgctatctgccaaatgcacagaactggagcagtaggactatttacgattcatgtttcctattgaaatactgttcttagctactaagtactaaggtacttttgtgtaaagcattgagacatgactctgcatgctaggtgttgagtgcacagtgatagtggtagacaagtattggtttccaaatttgacagttttccaatttggtgtgattaccttaagtccagctataccagagtgttttcttcaaggcttacaatagtgaaagataacaattaaatttttaagagtaattactgtcagtagcagcataaactttcttccctttattcttatgacagcttgagtcttcatcctttaggtcccagtttaaatataatcgggaagacttttcacactaactcatgtaagtgttcctgtcattctgttagttcctcccccttttttttggctagtttttcttgggactttgcatatatacatatttgtttgtttctggtctgttagtcccattagtgtataagctccttgagaggaggttccatgtccagcttattcacaatcgtaccctaggtttccagtataaagcctaacaaacaatgcatttaatcaatgacattcttgacatttttgtgaagagcatttatttgatacttaatttttctttttttttttttgagacagggtcttgctgtgtcacccagggtggagtgtggtggggcagtcatggcttactgcagtctccacccccttggctcaagtgattcttccacctcagcctccttagtagctggaactacaggtgcacaccaccatacccagccaatttttaaaattcttgtagagacagaggtctcactttgttgcccaggctggtctcaaactcctggcctcaagtgattaaatttttaaaataatgtattttttctttatttttccaatttatataaaaatggaaatattttttattattcattaacgttgggtaacactttatataaactttccctttgtgttatatggaagtctaaatttacagaatactttaaaaccccacggcaacacaaaacccacatttgtccgtgttccttccataatttgaaaactttgcctttttcccttacactgacttgaagcctggcagcttgggcctaatttacaaggcactaagtaagtactctcttaaaaaacagagagtgaggatgccctgtttcacaacttaattccaaaaagccaagtcagacgaaatcgacccactttcctgctaagggtttgtcccaagaggcgagctcttctctgtccgctccagccaagctggccgattgcccctgagcactggacacaaccttggtgtcccggtttcgggtcagggttactttccaattgttaggcacgactttgtgcgtgcgtgcgagactgtggactcggaggtgcgcatttggggcgtagccgagccatttaaaccagcgaatccgcgttcaccttgtccttccacctctgccctatctcggcagatgctccacggatttgcacgaactcccgagtcttgacctccctcccctctccgggctgccgggacaactcggggcggccactcttgccaggaggcgtaagtaaggatgaagttggaaaaactgaactaggtctagggcacgctctgcaacacagtcggggagacgcttcagagggccggagagggaggcaagttgccacggcgcgaagggggcgggccggcttgggccgctcgcatttcctgtgacaggggctgccccagcctctccttctcccgcggcggcgggaccatttcctgaatcgctgaagcggagggaggactagggcgcgactctaccattagcgcaaagggccagggggtgcccataaggagagctcgggggatgcagggacggtcaagaaagttcggccagggctaggggtcccccagagtgcgcagaagcgagacatccctggccagagtgcctccttcaggcctgccccgccgcccgtccgcttggccccggagcatcccccctccccgcattcccgaggtggttcagcccgagaggccggcgtctctcccccagtttgccgttcacccggagcgctcgggacttgccgatagtggtgacggcggcaacatgtctgtggctttcgcggccccgaggcagcgaggcaagggggagatcactcccgctgcgattcagaaggtgaaaccgcgcggggttgcggatgccaggcccttaccgcctctgggagagacagacgcggggggaagggccgggcccggagtcgaccgggccgaggcggaggcgggcctgctgggaatcagcagtgtttgggaacacggactgctggctgtgcctgagtgggtggcggaagagggtgaaccggtttttctcggagtctttcacgcatttacgcgtttttctacagacacaaaagcccaaacagccgccgcctgatttctctagggatggggcggcgttcgggctgcggggcgcgtgcgcccggcggcggccgctcagggaagggcgtgtgtcggaccggcggccccgcgcgttgctccggagttactttggcgtcgccccgccccgcgtgccgcggctgcttcgtgcggaccccaccgcgggtcgcggcaggcagaggggaagtcggtgcgctggtcgccgccctgcaaactcagccgagtttgggagctcgcaggaggacttggggaacgctggagggaaccttagtatagagtttgaggagcgggcaaggaaggtccccatggactctggggttgtccccagagcctcttcttcccttctgcatcgccgcctattcatttattctgcagcaaatatttattgagcgcctattttaggcgctgaggctactgtggtgagtcatggtccttgccttcctggagcttacagtctaatggtggagactgtcgtgaccagttaatgtaagtcgtgataaatacacagggagctgcctcctttttaaaggatagagctgctgcagtcgctgctgtgttactgccagtcggaacacaaaggttctttattgtcctctaccccttgttgcctgcaagcaaggcagcattctaaattttactgacctagactttcagaagttgctgct

SEQ ID NO: 27 - DNA, 6000 bp, Homo sapiens
aggattcacactaaattccataaagaggagaaacaaagaaaaaacaaaaagcagaaacatatccagaaggaatatgaagggttaaaatacataaaacaatgcaggtacattgaaaataaatttttcaaaatcaagatactactggctttcacttttggcaatactggatagtttctggccaaagtaccaatgaaaagctcagctgtgaagcaaggatgtgctttaaaataattgtcaaatgaaatcgcacaataaaacatatgcctataaagataatgtccaaagaactacaataggggaaagcaaatcatttccaatataaatggagtatttctaaataagtaagaaattataaatgcaaaccactcagagtacttaaatgcaaacacgacaggccacattcaaaacacaatgcaaagttaagcctaacaccagcaggtatggtacttattattttaacagatacaaattttaagtgtgtctttatagttttactaagttttggttagatgaactcccaaaaaagtgtcaacattgaaagtaatgtataaagaatcattcttcaaaacggattataacactaaagtttgatatttttctagtctgtttcttggtgcattctatttcaatttgatgatacagtacaggaaaagcgtcttgtatataccttcaaacactctatgtaatgttaaagcacagttcttgggtttagaaattttcaggactgttgatgcataaaagctatctttaaacattctatttccccattactactgaatgactgtgctagtgcttaaaaccactttccttcttagtagaaaagccaagatggaaaacagagcttggtgcttataaggaaagaaaacagagtctagagatatatgtcctcctgttcttttagttcaaagataaaatcagaaatcaattggcattgttacatgtaatattttgtcatttagcagatgacacctagaaatagaaatcattttagttccttaaagagtttttgttttctcctgtttgattcttccttaagttatttcttatttattttctttaagattttcctcctctatcttgccagaacaggacttgaaatataaacgaaaatgaatgaagagggagaaacacttctgaaaggctatggtgaagccaaggagttttcactgtgtttgggggtgctcatctcacatttgcctgttcatgagtcctgaggcttgaaatattctgcttaagaggcattatagaaaaggtaatctcttaccagcaggcttctccgagttttctagtacataataggttttaaatggcccaagttaggccacaactacagaaaagggctgtaaatgcttcagttttcatttcagctatgtggccacctaactaaatgtgtggcttgttctgtaaagtgacactgaatacatccaaaggcctggttgctaatgggaatgcataggtaatcatgtctgggtccatgaatcacccagaaattgtttccaaaatcctgtgcacacgtctgaagagcaattccatagctttcatccagctctcaaaggggtgcatcaacacaacggtctaagagccattgtgccaacatctgttccagcccttacaccaggatgccacaggataaaggccaaagcacatggcctcaaaatattccctggggcaagtcgcttcctgtctgtgaaaacgtgtatattaataacctgcttcacagtaagctgatgaagaacagataagtgggatgttgaccaaaatttcctaatttgtagaagttacttccattgtggcaagaagacaaaaatcatttaagaaatatgctatgtgcacatttgacaatgggagctcccagacactaaggaactgcctctgcttgcaaatatcggggcaggcactccactctctgttcttttcacatcccacatgagaagaacacaataggccacattcaaaacacaatgcaaagttaaacaaaacaccagccgggtactcaggcctgggcccaccaaagaagaaataaagacataatgatatcttatagtgaaatcaaccttcagaaacaaaggtatttaaaattaccaagtgacccttttggggtctacaacacttaccagaccttaagaaagcggaagacggagagacgactgcatcaggtgagcaggccatttcaaattgttggctctaatcataagcgtcgcaggctaagctatagcaattttaaaactgtttagtaaaggttagaagcaatcagtgttaaattaattgaaagcagtgtgagcagttattaacatgatgcagtatgcaacaaaggcagtaactgaggatcattataattttattttctcttttatgacttgaaaatgtgattttctttgctttgataaattacacttgctcatatggatgagatagaaactatataatatccacttattagacattacataaaagtagtatcctctgttgtgcagtgaagtaattatgctactatgtaacaatgctcagaactctgtggggaggactctatactggagtcaggttagtcaagtgtttaacaaagctccatttatatattcttctaaaagtaacaaacagaatcaagttgattgcttttaatgatacaggaagttattaactcgagttattaactttatcctctgtacttcatatacttacaagaatctgaaacctcaaatttaactattaatttggaggaataacttcaagtggtatctctttactactatgatgtaaacatacaggaacattcaacattgatactatgcactttgcacataaaagtggatttaaataactgcactcaacaacagttaacactagaattttttttctcagctaagaaaagagaattaaggttttcaaagcttactgttatgacatgcatttcagaggaaacaaagactgacgaagaaaatcaactctatgagcttatgaaagttaaagagaaatgttgcaaaaatatatgttgggggcagtactcaggtccctgtaagaaaactccagttattctctttgttcagacataaccaatccaataacactttttatatccagatagccacatcgttagtagccaactcagtatttctatatcacacaaaaacaatttaagaaaaagtgtgaaacaaatacatgtgactattccaagtcactttattgattcttagtagtactaaggactactttttgaaaaaattatctcatacttcatagatggtaattttactataaccctaagtatataaagctgaactttttgtaaggtataaaaaaacagagtgttcggtgtatgatttctgaaattagattttcagaaattagatttactttctccaaaaaaaaaaaaaaaaaagtcagtgtgcacaacagacaactaagaacttcataaataggaaaagcccaaaacgtaaggagaacatattaggtgagaaaataattttttttttttttgagacggagtctcactctgtcgcccacgctggagtgcagtggtgcgacctccactcactgcagcctccgcctcccaggttcaagcaattcttctgcctcagactcccgagtagctggggttacaggcgcccgccaccacgcccaggtaatttttgtatttttagtagagatggggttttaccaggttggccaggctggtctcgaactcctgacctcaggtgatccgcccgcctcggcctcccaaagtgctgggattacaggcgtgagccaccgcgcccgtccgaaaataatttcttaatatcaatgcaagtgcaaagttaattttcctagctaacacctttcacacccacccccaataatgacacttcatcaattctttaaaagggaagctccttagctgaaaacctgcattccgcctttcacctttcctgtttaagtgcatgccttttgttcaagattatatccagccaaccaggaatacaggaagttttaataacgccacaagtcatgacgttgcaatttgaacaagtcagttcgggacacttggaactgttaaaactgcctgcaaggcaccttctgacctctatgctttcgggtttggaaaccacacaacctggggccacttaagaagcccttttctttctgggccctaactatactcttcaatatctgaggcccagtctccttcagtttctgctagatagatgacaggtctactgcttagaacctgtggggaatgtaaaagggatataagacataaagcaaggagcccagacgccggctttctgcagccagatcgtagttacatctgacttggtctgattaagctatctgacttttgcagagaacattcacaggaaagacacattcacagggaagacacattccctttcccaggaatgtgccgccgcccgatttttaagttagaagactctaagggaagtccggaccgctgcctactttccgagtggggctcacaagcggaatagagtcgggggcacacgcagagtggagctggctctgccacctaatttttagaggtggaggaagatattagaaacaaggccagggccgccacctgctttctaaggaggaactcggggcacaggttcattcccagggcccccacctgcctcccgccaaggcgcttgaggcgaagcaccacccaaggtactcgggtggggggcggcgccccagccagccaaacctgagcgcttggtccgagctcttcgctccaagaccttccagctcacttctgccgtgagtcccgccgcccccgccatcgcgctccggtcgccgccttggccaccgcccccggggccgcctgtcagcaatgccgggccacgccccccgcacgacactgtcgggaggcgcgcctgccggaagtgagcgtgagggcggctttcaccctagctccactgcttttttagcgtcggaagggcagccctagtgggagagagaaaaaggagccggcagcggctcttacgcgtcccggggctgcgcgccactctctcggccggtaacgcggtgctttgcggctgtcgtcaagcgcggcgttgggccggcgggcgggggctgaggggctgccatggcggcggcgggccggctcccgagctcctgggccctcttctcgccgctcctcgcagggcttgcactactgggagtcgggccggtcccagcgcgggcgctgcacaacgtcacggccgagctctttggggccgaggcctggggcacccttgcggctttcggggacctcaactccgacaagcagacggatctcttcgtgctgcgggaaagtcagtgcttgccgggccctccctctgttcgctgtccgtgtgcctctcccggtgttccccaaacccattgcccaatggccggtccttctgcatttcctggtccttctctcccagccctgtggccttccctttagcattcttaacagcttgtccttttgcaccaccctttccaaccccaggttctgacccagctaccctacagtttgacctaccctcaaaagccctgacagcacctcagttttgttcctaagaagtctgcggccctcacccagtcaccttaccccctcctccccatggaatcacctgttttccaaagtgcttcctgattcctaggaatctttgtagcttgcctcaacgttcgctcccaaggcccactcattcctttctattttgcttcagtcttccttccccgttgatgaacatgaaaaggtgcaacctgacaatctcttctcatagggggcttcttcttgcctccccacctacctaattcgcccacccctttctttgtcaaggccacaactttctatgaagcgaatgtacccttccaagggcctaaacactaaacagctcacacaagcattttgcagggaccactgataaacccaatgcctccttgggaaagcagtctcaaactacagaaatttctctcttgagctgcctgttctttcgtgtactccttcctcatcttggtcatcaccttagtgttccaaatgtctactttctttgctaa

SEQ ID NO: 28 - DNA, 6000 bp, Homo sapiens
taaataatagatataaataagatacaagtataaagttactaaggttttctttttttcttttgagaccaaatctcgctctgtggcccaggctggagggcagtggtgcgatcctggctcactgcaacctccgcctttctagttcaagtgattctgtgtcagcgttaggccgctttggcctcttaaagtgctgagattacaggcgtgagccaccacacctggcccttttacaaaattgaagaaatgaaagggttaccccgcccaaaaaaaaaaaaaaaaagattacactggaaggaagtcacagattaaggatcaagactgttgagtctttaggttccaaaagcttcacctacatttttcttatatgtatttggatattaaagaaaataagttacatatacaccatggaatattattcagccatttaaaaaaaataaaatcttgtcatttgtagcaacatggatggaactggaagtcatcatgttacgtgaagtaagtcaagcacagaaagacaaaacttggatattctcactcacatgggagcttaaaaagtggattttggccaggcgcggtagctcatgcctgtaatcccagccccttgggaggccaaggcgggtggatcacctgagctcaggagtttgagaccagcctggccaagagggtgaaaccctgtctctactaaaaatacaaaaaattagccgggcgtggtagcggatgcctgtaaatcccagctactggggaggctgaggcaggagaattgcttgaacccaggaggcagaggttgcagtgagctgagatcatgccatttcactccagccaaggtgacaagagcaagactccatctcaaaaaaaaaaaaaaaaaagtggatctcatgaagatagagagtagatcggtggtatcagaggtcgggaggggaaggggtggggtgatgaaaagaagtagattaatgggtacaaatatatggttggatagaagaaataagacctactgttagatggatcggtaggtgaccatagtttaatcagtaggtgaccatagtttacaatatctactatacattgtgaaatagctagaggagaattcaaatggttctatcataaagaaaagacaaatatttaaggtgatggatatcccaaatacaccaatttgatatttacaaattatatgaatgtattaaattatcacatgcaccttgaaagtatgtacatctagcattcatcaattaaaaaaccccaaaagctcttactctatagaaatagtaattcattgtcattttatttaaatctgataaagcacaatctaaagcagactcctttcctcactgctaattgcaattttatttatttatttatttatttagagacggagtctcactctgtcccccaggctggagtgcactggcacgattacggctcactgcagccgcgaattcctgggctcaagtgatcgtcccatctcagcctcccaagtagctagaagtaacgtgcctgccactatgccctgctaattaaacaaattttttttcttgtagagacgacgtcttgctatattgcccaggctggtcacaaactcctggccttaaatgattttcccgccttgtcctcccaaagtgctgggattacaggcatgagccaccacacccagtctaatttttaaaaattatttaagtcagaccagtggcgtgtacctgtagtcccagcaactccagaggcttaggtgagaagatcctttgcgccaaggactttgaggctgcagtgagctatgatctcaccactgcactccagcttgggtgacagagtgagatccatactgtgaaaaataataatacataaaaaattaaacagggcgcacagtggcccatgcctgtaatcccagctctttgggaggataaggaaggcagagtgcttgaactggggaggcataggttgcaatgagccgatacagtgccacttcacttcagcctgggtgacagagtgagaccctgtctcaagaaaaaaaaaaagtatttatattactttagtgtcgtgtccctgttttctttgactcatatggggatccagctaaaattgaactgaacaccagaaatgaccttttaagagtaaaatggtatttcatcaataaatactttattggacatatagtccctatattacatttttatggaccttagaaatacacagaagtaaaagataaaatgggttgcccactgtcctcaatgggctaacaatctatttgagaagacaaagcatttaatacatagagacattttcttgttggatgtgctaaaacaatgaaagatcaaggaggtagacttgagagtctggatggatgtagattaggtggcacattgcagttaaacaaggaaaagccctaggtggcatggcatgtagtggtagaaagaatggtggaaggggccaggagcagtggctcatgtgtaatcccagcactttgggaggctaaggcaggcagatcacttgaggtcagcagttcaagaccagcctggccaacatggtgaaaccccgtctctactaaaaatacaaacttagccaggcagggtggcatgtgcctgtaatctgagctgctcaggaggctgaggcatgagaatcactggaacctgggaggtggaggttgcagtgagttgagattggccactgcactccagcccagtgacagagcgagactctgtctcaaagagaaaaaaaagaatggtggaagggtaattcacaaagtttatccagagtgtcaaagctcattcccaggctcttgaaccatggaactatcccagaaataggcagtaaaaagaggcacaggatactcttcaccttctgtgatattttcaatttagtgcatcttccccctgcccccccccaccccccgccgcttgctggagtacagtggtgcgatctgagctcactgcaacgtctacctccagggctcaagccagcctcctgaggcctcctgaaaagctgggaaaacaggcgcaaaccaccatgcccggctgatttttgttttttttacctttcatagagacgtggtctcactgtgttgcccaggctggaatttagtgcatctttattgaaaggatattgcattcatgaaattagctcataattgagtgtcaaaactgcacttaagtcaatcattttgtaggctattgtacatagtagaaaaagtaagaacgaccactctatctagaagtttactgcatatcaggggagattaggcaagtataaaaatgactaatacaaagtagagtgaggtaaggatgaattaacaggatgggagattattactgtggcagattggattttccaaaaattcccacagcggtattttgaatcccacatgttcttccagaatcttgccacaatctcccctagaggtggtgtccctaggacttgtggctgcccctacagacacaatgcagtaaaagatgctggttcagttctgaggacatcccttggaccccagctgccacgctgtgaggaagcccaggccgcttggagaagccatctggaggtgctggagctgacaccagcacccaatgccagactggggaatgagggagccacctgatcattccagtccccagccctggggctgtcccagctgacctcaagtacagcagagactcatgcaagctggacctaaattgcacgcccccctgaaatatataatttatttcatgaacatagatctgaacattagaacagattattgaggccggttttggtggcccatgcctgtaatcccagcacttggggaggctgagacagctggattgcttgagctcaggagttcgagaccagcctgggcaacatagcaagactctatctctacaaaaaatacaaaaattgggtgagtttggtggcggaaacctgctagtcccagctactcgggaggctgaggtgggcaggtcgcttgagactgggagttcgaggcagcagtgagctatgattgtgtcaccgcactccattccagcctgagccacagagcaagaccggctcttaaaaaaaaagaaagaaagaaagaaaaaagataacagtggcttcaggaaaactgttccacggtaggaggcatacgatcctgatctctgtattttggagaagacggaggggactagcttacgtcgagacagaggagttcataactattaactatacacaacgacgtgtcacaaatgtttacaaacttccaagagataacgataagaagcggccgggcgcggtggctcacgcctgtaatcccagcactttgggaggccgaggcgggcggatcacgaggtcaggagatcgagaccatcctggctaacacggtgaaaccccgtctctactaaaaatacaaaaaattagccgggcgtggtggcgggcgcctgtagccccagctactcgggaggctgaggcaggagaatggcgtgaacctacctgggaggcggagtttgcaatgagccgagatagcgccactgcactccagcctgggcgacagagcgagactctgtttcaaaaaaaaaaaaagaaggaagcaaaatacgattggttcggtcccgtccgctctcagcggctcagtcccaggcctcggggccagaaccgtgttccccgcgctacttgggcggcgccgagatcgcggcctccccgaagggtgcccaggaggcctgggtcggacgtggggcgcgaggaaacggcgggttttccacactgagccgcgaaagcctgtagacgacgaagaaccccgcagccttggcctctgcgcggcttccacgccccacggctgcccgcccgagccctgcccccaggcgcgccagccccgcctcccgggtcccgggtcctgggaccgggcccgccctgccccggcgcccgtggtcaccatggcaacgcagcggacgtcggccaacggcccgccctgggggcggggctgggccggtcgggcgcgcgggtcaggtggcgaagggcggagtctgcgcggggttgggcggagcctgcgcggggccggtaggatcgcgtcgggagccggtaccgaggcccgagccgcgggagtcgagcgaaggcagcgccgaggccgcggtttccccctgggcctccccagcagcagccatgggcagtgagtagcggcggctggagcggggactctggctgggaacgcaggccccgcctgggctgcgggcggtggggctggcgctcgctcggagtcgtgggggccagggatgcgcgggccgctccgggcctcagcggagggcacgggccgggggcctccgccgaggctcccctagccgtgcgaggccttgcccggcgggtaccgggacccggaggcccggggtttgcgtttgatagagggcgaggatggcgctgggaggccattggttttgggggcggggagttagggcaccgggtgaacctggaccactttttaatttttcaggagttaaagaaatcccgtgtttttattccctcgtcatctttccttggcatgttgcattgaagaaagctcccctaactcgtttaattttaaaaaaagtgatgcatggcgtgtgttttagggaggaaaggagtgtgcattggtaacagcgttttccttaaactgttcattctgtagcgtttactgaaaactgtaaggttttataagccttagggacaaggccttatgttataggaatgtttttcagggccctccccgtaacactcaaccccacatatgtgcacgtagctacttgcatagctgtgaagatgttcgttggatgatgggtcgtgcatacccaagcagggcacccattggccaactagtggacatttgggggaaattagaaaggagtaggagagacccgtggtaaaattttgcatcacaaggatagacagggggcagccaaaagctttgcttgaacatgaataccccttacagatgatcataaagtgtcaagaaatctgagagtggcttggattgaggtggagaggaaaagggatggagaggttctaggaagcctcctgatgtgattgatacttgtttcgcgt

SEQ ID NO: 29 - DNA, 6000 bp, Homo sapiens
gtttgagagcagcctgggcaacacagtgagaccccatctcttaaaaaaaatgaaaaacaaaactagacaggcatggtggtgtgcctgcagtcccagctactcaggaggctgaggtgggaggatcgcttgagcccaggacgtggaggttgcagtgagctgagatcctgccactgggcatcagagtgagaccctgtctctaaaataaaataaaataaaataaaacaataaaataataaagtacctccaactaggtggcttaacacagtagaaatttatggtttcacagttctggatgtaggaattacaaaatccaggtgacaccagggccatgctgcctcggaaggctctgatgaaatccttcctttcctcttcccagtttctggtgttgacagcaattcttggtgttccttgacttgcagatgcattggtctagtctctgcctccccagagttctctctatgtgtctttaccgcctctcctctccttgtgtgtctgtctctgtgtctcttgtcctcttataaagacaccaatcacattggatttaagggcccactctatcccagcaggacctcatttcaacttaacagtggcaaagatcccacttccaacaaagtcacattctaaggttctggaaaggacacgcttctttggaggacattatgtaacccaggacaagtaccatgcaagggaaatttgtgtgtgtggagtatggcgcctaaaccatcaagacaggaaggcaggaacagcagaacggcaatgggagggagggaaggaagtggagggtggtaaattttgcttgctttgcagcttttcacagggccccgagagtgcttttagcactaaggatgtacagtcacgcaccgaataatggtttggtcaatggcatacatgactgtgatcccattgtaagattataatgctgtatctttactgaaccttttctatgtttaaatatgtttagatacacaaataccattgggttaccatttgcttacataattcagtacagtagcatgcagtacaggtctgtagcctagaagcaacaggctataccctattattctaggtgtgtagtaggctacctctaggtttgtgtaaatacagtctatcatgttagcacaaggacgaaatcacctagtaatgcttgtctcagaacatagcactttcgttaagtgaggtatgactgtacttgaatcaccaggactaggatggaaggctgcacactgtaacccacccagcttccacccagttttctcaagtctagacttctctttttccccttttagatgaagggaagaggtttaatattagaaatcaaacaagactcaaaattgggaaatgtcaaaactttgtcactttgggcaaatcatttgatctctcagtctgtttcctcctccttaaaatgaggatgttggactgttttcatgtctgtaaaaagaggatgttgaggatgatcattaagggtgcttctggctctataagctattgctctaggaggaagcagtggaactgtgctcccctgtcactgttaagaggatagattttcaatatgaccagtggctatccccattttttaacaagcatatctatcagacagcatttgtaacggtaaacaacagaaattggttatcttgagcaaaacagggatttattagaaggctttggggactggcaccaggatcaatttggtgcaggtaccttattacagtagatgtgatcccatcctcttccaggagctttccatgattatatcacttgcacaacagtaagcatctggacaagagtttcttttcttttcttttcttttctttcttttctggtttcttttcctttcttgcttgcttgcttgcttgtttattgagatagagtttcgcactgttgctcagaatggagtgcagtagcatgatagtggctcactgcaacctctgcctcctgggctcaagcaatcctccagcctcagcctcctgaacagctggaactataggcatgcgccatcacgcccagctaattgttgtatttttagtagagacagggttttgccacgttgcccaggctggtctcaaattccctggctcaagtaatccactggctttggcctcccaaagtgctgggattacaggtgtgagccactgcgcccagcctggttctttttgtagacagagtcttgctctattgcccaggctggagtgtagtggcatgttcatagctcactgcaacctggaactcttgggcttaagtgatcctcccacctccatgccactacgccctgctaatattttaattttttgtagagatgacatctggccatgttgcccaggctggtctcgaatcgctggcctcaagtgaacctcccgccttggcctcccaaagtgctgggattacaggtgtaagcctccctgtctggcctaggcaagagtttaagtaggtgagtcatgggcacatatcttagctgtgctgggtgttgttagggcaaagataagatttcctccaaacggagagtgagtgctgatggaaaaaagggttcattggcagacagccaagaagatatcacatgtttatggccaagaagtgtttggaattcagccatgcatggagattttaatagtatatctagacactaatatctctaccctgaagttgttgctatgttattgttatcactatgtagtggtaaagggctcatattctgaaatcacagaggcctaagcctgaattccaactctgccccacagtagctgtgactttgggagagtaaattactactatcacactgcaagtctcagtttcctcatcagaaatatggcggtgatgttaatactgaccttataggattgatatgaaaattgaaggatatgacatattcaaaagagctgaatgcaaggccggactcatgaagttttattacctagattaggcccctaggggtttttgtgcattatttcatgtaatcttacaactatttgacataattaatatcgagccccctcactcaccctttacaaaagtagaaactgaggttccaactgagaaacttgtttgaggtcacacagctgtatgacctgtcaaaactgtgcttctgcaccagctctgccagactcagaaccccagggtcttaaccatacatttaagtgtctcctaaaagagtcaacacttccccatcctgcacagccccattgctgcgtgaaaggctcactaaccccctgctgcacagctcctactggttgtcattttagaaaatatagggagacactggaactccgaggcagtaggattgaaacgtttgcttcttttcttttttttttttttgagacggcatctagctctgtcacccaggctggagtgcagtggtgcgatctcggcttactgcaacctccgcctcccgggttcaaacgattctcctgcctcagcctcctgagtagctgggattacaggcagctgccaccacgcccagctactttttgtatttttagtagagatggggtttcactgtgttggccaggcaggtctcgatctcctgatcttgtgatccgcccgcctcggcctcccaaagtgctgggattacaggcatgagccaccgttaattactgtttgttgtgtttcccactaacttctctgacaattctatttcaacctacattctccaatcactgtaattagatatttgagaattgtgttgcatttcaatcacggtaacaataatggtagtattttattaataaattcaagtaaaaactgaagatgacaatgatagtgtatgatacatgacatcaactttgcatcacctaaagatccaacttttctgttatgaatctagatttcttggggaaatccagattgtatattggacataggaattaagattactggacttgaacttttttgtaactaacaactttattgagatataattcgggtaccaactcatacctgaacagctttttagactttttttctagcccttttttctctgtcctttcggttttcttttaaaaaggtccatactattcaagaaacacaacttttaaagtccacaataattctcattagattttaatatttatctccccccaagctttactgaaatactaatgatattcatttttttaaccacttttcatcgtaagagaaatacaaattttcctattgattcttatgcacaaaaatcaagtttttgtggtactgctatacattagtagtatgttcagccagtttccaaagaaattagtcaagatcccaacatgcaacttgtataccacactaccttggaattcggcggcacaaacaactattccttgtacaaaacctccctgaaaacgactaaatggaaaagtggatggcttgaaacaaggaatgtttggttttttaaaaagcatttttcacaatttagtcgaggtgtggggagggtttccccacttgtggctctgcacagcgtgcgcgcgcgtctgtcctggggtcccctccctgcggggacgaggccggggtccccgcgcgagcccagcggacctgggcagtgcgggggtccgaccgcccgccacagggggacagggaccgcagccgccaaatccgcggggccggggaacgaggagactttcctttccgcgttagccggggccacccccgccagagggaaagcaccaaaggaaaaaccaggacagggactctgggggccggaggagcggcctcctgcaggcaccagcggaggggcgcgggggtgggggaagggatcagggctccgcgctccgtccgccccacgaccccggcccggcgcccctcccctcggaacccccacttagtgcccggcccccgccccgccccgcgcggcccccggcctcagccccgcgcgccccgacgccccgcctgcgccgcgggcccgagtagtggacggggggcggcccgctcggctcctccgcacccgctccccgctcgggccgaggcgccgcggccgcgcgcccctcctggaggaggaggaggaaggaggcgggaggaggagttgccgagaggagaaggcgagcgcggcagtcgcgccggcgctgggcgaggaagcggagccgggccgcctccgggtaagcgtccggggagctcgggcgggaggcaggggcagggcttcgccgtccgcctccgggtcgcccgcggtccgggacacggctggttttcgcctcggagtgcagggggcggatccggcgcgggccgggccagggaggccgccgggcgcggggctgcagcgacgggtctgggtcagcgcgaggccctgcgccgtctcggcgggtgcgcgggcgggggccagggccggggaacgggggccggggccagtcccgggagcggggacgcggaaaccgggaagccggggccggggcgcggcggcccctgaagggccgaggcctgcgcggccgcggacggctcttctcgacccctcggcctcttcggccgcggcgcgccggcctgggccgccgcctttgttgcccgcagctcgccggggagaggccggggctccgcgaggcctgggcagcggcgcggggcctgcgcggctctgcgccccggccgggtccctcctcggacctccgcgggctcgggctcgggctcggggtcggggcgcggcgaggccgcaggcgcgagggcgggcctggggcgcggcgctgggactcggggacgcccccgccccaccgcgaggtcgcgccggcgctggtggaggtgcaggccggggctgctctgcggctgaaggtgccgccggccggctgcgcactcacccgggtgtagggaccggacgattgtggaatttaaaccgctcctgggaccgacacgggcctgaattttcagtttgcttcgggagttggcaacttcaggtacacccttgtggctcacggagcagaattatggacgtttctcaggggcagatcctggcacaaaacttgggatatgtgcagtagtgtgtgtgccaacttaacgttcagttggaatgtgaaattggggttcccatccccactgtttggaatgaagggccag

SEQ ID NO: 30 - DNA, 6000 bp, Homo sapiens
caggctggaatgtgaagataatgagtttggcttccaatacattgaattcaacgtgcctgtgggacatctgtgcagacagcatagccagttacacagatctgcaaccaggaggtgaggatttagcctggagatactgactggggagtcatcagcatgtagatggtaataaagctcaggagtaaatgagatagccccagggtgtagattggtaagagaagaggatggaaagcagaactctgaagactgccaacatttatgagatggaaattggagacatctatgattagaagataagaagaaaacgacaagcatatgatatcttacaagttaaggggagtgttcaaaaaagacaagaagtgaggaattgtttagattgtttatcctggaggtcactggtgaggaggtcagaaagggccctccaactgcttccaagctagaccttctttctttgcaccatccttacagcatggaattgaggattagggcttagaagccactttctccttgtttgttcattcattcatttattcacatattcacttgccctgcatataaccccccatgtgaagagatacaaaacactaaagacaggctctgtcatcagaggatcagggacccaggggtcatactgaactagatttcaatctcagttctaccatttagaacataatctttgatgactccaaaatccctatctccaggacaaacatccccactgggcctgtatatacaattgtctcctcaatatttccattgggatatgagccaactcaacttagaaaatccctttactcaccagcctgggcaacatggtgaaaccctcactctacaaaaaaatacaaaaatttagctgggctgttttgtgagcttgtagtcctagctactcaggtggctgaggaggtaggatcacctgagcctgggaagttgaggctgcagtgagccatgattgcgccactgcactcaagccagggcaacagggtgaaaccctgtctcaaaaaaaaagaaaagaaaagaaaagaaaagagaaaatagagaagaaaagaaaatacccttactcaaataatctaatcctgttcaattttcccctttttagtaaatggtgctaccatcagccttttgttgagatccaaatcctaggaatcatttttaaaacatttttggaggatagaagggaaaaatatagagtataaatattatagtatagcctggcatggaggctgacgcctgtaatcctagcactttgggaggccaacgcagctggattacctgaggtcaggagtttgagaccaggcttaccaatatagtgaaaccttgtctctactaaaaatacaaaattagccaagcgtggtggtgcatgcctgtaaccccagctactcaggaggctgaggcaggagaatcacttgaaccctggaggcggaggttggagtgagccgagatcacgccattgcactccagcccgagcaacaagagtgaaacttgtctcaaaaaacaataattatagtatatataatatatggtatattatagtatatatatggtatagtatatatggtatattatagtatataatatatggtatagtatatatatggtatattatagtatatataatatatggtatggtatatataacatggtatattatagcatatataatatacactataaatacatataatacatatagtatatttatactatatacttatcaccatatactgtatatcctatactagatataatatgtactatatataatagtatactatacttttatagtgtacttataatatatagtatcttatactatacttatatagcacacttataataagcgtactattatataatatataatagatatataaggaaggccctgtgtgttctggcccctacctttcttcctggacacatggccttctttctgtcctggaacctgcctgttctattgcttttgcatttgttttttcttccgactggatcgctcctcccccaggtttcacctatctgactctttgtgtgcattcaggtcccagctcaaatgtcactttttcagaaagcctttgtgtgagcctgttattctctatcacgtaaattgtcctccgtgtatttacgttaaattttttgtacgtttttctgggaattctcagggcctagaaaaatattttgttaaagatttattgactgaccattgaccttggcagatttctgcagttctttaagccatggtttccttattaatagaggaataaatgcctatcttgctaggtagtttaaagtgccagggatgaagttaaaagtattaaggacatcgggaaatctccccacactgaacctttgcatttccctgctcagttccaccggactgctgagcagaccgacaaacgctcctttccctctgggtaaaaagagccacgggtcttcacttcaggcccaggaagaggtggtcccactacgccgtggcatcatcgcttttttaacaagcgcggaaaaccccctcccatcccaatgtttaatgtaccgaagtttgtgagagtcacgtgagactctcgggtctgccccgccttagggaggtggagcctcagcttgtgggccaatagcaggagcagcctccggaacagccccaacgcgacagggaaagggggaggagccgggcgcccggccctgtaactgtacttccggaaagcacgccccgccccttcccccccaccgcgcccgtttctttcgccagtgccgggtgggccgaaccggcgggtgccgattaaaggcgccgcctgccgctttctcctcgccccccagcgccgcagctctccgcccccttcccgagtagcgggaccggccttgatgtagggacaccaccccccgtctccttccgccccagcccgggagctcggctcgctgcagcccctggccctcccgtttccccaccctgcctgccccgctctgctccgaacccattgtatacggccggctgcggactcccaggccgggccgtggcgggggccccgggacccccgagtgcccctccggctggtcccgcgggccgcggcatctccgccgccgccttcctcgcggcggcggcgagggcgccctttcctccccgcgcgggtgacggggacgcacccccaccccggggcgccccttcgcggggggagagccgggcccgagcaagtcgaggcaggaaagggccgccacggactgcccggcccgccgatcgtttttattatcgagattattattaaaagggggcggggaccccaggacgcgggggaggggctggatacgcaggtatttttattaaacagattattcctgaaataataatacgcgcaagatggctgaaggtggctgtgatgagagtgttggggttgggatttttttcttcctgttttttcttttttgatctgaggataaagctctgaggcgacagcggctgcggagaccctgcccgaagcgccctcccctcccttgagaagccgcgggcagacagacggacctcggaccgagcaacgggtgcgggcccgccccggacgcgtcgcctgggcagcagccggggaccgcgggctctcgcctttctgccgacttcttccaattctcatcttcttttattttttggacaggaccggggtgggtggagcagaggtggagagaaatcgggacttggcattttctccctctctctctcctaatttgttggaggccgccagccctccccttggaaaaaaaaaaatcccaccaaaaaaaaaaaaaaaagaatcaggagcgagaggacgccgcggggccctcagcgagcgcgcccagaccccggccgccgccgcggagcccaagatggctgggcgctgagggtggcggctcggcctggccccgccgccgcaggctggctccgaccgcagccccgagccttccaggccccagcagaggccgagaagaaaagaaagtggggaggagggggccgggggggcgaagggggagggccgggggaggggaggggagggccgggagccgagcctcctgttcattagcagttgagaaaaattcctttctagtttgatcaatccttgttttcctcggcagagcccgggcgcccgcccagcgcggagacgggcgcgcggggtctctccgcggcgggggcgccgggcctcgggggagcgcagaagtagccgcccgggggtcaggccggagcgccgccggggcttctccctccctccctcgccggttgcctttttttccacttctctccctcccccttccgtttctatttgtgaagggaggaggaaggcagaggcgggctggtgtctctggccggggactggaatttcatctgaatgactgcccctgcgcgcacgcagcgccccggagtcggcccgcccgcgccccgcagcccgcgcccggccagccagccgggggacgcctgcaccgtggcccggggaccgccggcctgcccctcccgccccgtccggatctagcagccctcggcgcggccgccctcgcctcctggccccgcagaccccgggctccggcccctgcgagggaggtgcggcgccgacgagccaggcaggagccgccgctgccgccgccgccggaagaagtgtgctgctcccaagctccgtctgccgcggggcgcgccccaatgtcagccgcggggacgagcgcaggccgcgggccgccactgccctagccgcgccgacggggaggcggcctcttatatggaatttggaccccggcgctcccctccaaggctggagtcccggccgcggccctggcgcagtccgccgcctcccgctaggcgctcgggaggaggaggagacgcagcccgctgcgcgcgcggcgtgaggaccgcggctccctcctccggggggcgggcacgcggaaggcgctgctgactgagcgaccgtcggggccggctggggccggagctcggggctcggtgggcctacagcggctccggacggacccccggggctggggagtcggggaggcctgccccggccccctgcccgcggccgccatggcggagaattggaagaactgcttcgaggaggagctcatctgccctatctgcctgcacgttttcgtggagccagtgcagctgccgtgcaaacacaacttctgccggggctgcatcggcgaggcgtgggccaaggacagcggcctcgtacgctgcccagagtgcaaccaggcctacaaccagaagccgggcctggagaagaacctgaagctcaccaacatcgtggagaagttcaatgccctgcacgtggagaagccgccggcggcgctgcactgcgtgttctgccgccgcggccccccgctgcccgcgcagaaggtctgcctgcgctgcgaggcgccctgctgccagtcccacgtgcagacgcacctgcagcagccctccaccgcccgcgggcacctcctggtggaggcggacgacgtgcgggcctggagctgcccgcagcacaacgcctaccgcctctaccactgcgaggccgagcaggtggccgtgtgccagtactgctgctactacagcggcgcgcatcagggacactcggtgtgcgacgtggagatccgaaggaatgaaatccgggcaagtaccctacgcgcgcgcgcgcacacacacacacacagacacacagtcccttcctctctcccgccccgggaccacccatcccgacaggctgactcttgtgacatcaggccagtggcccctggccaaactcttctctgaaagtttggggacagggtcctgggaagaagggccccgggtcgctacttggtacattctcgcacctgtgcgcacagggtccgtcttctgagtgctttatgggattggggtgtgggaccgtcaggggtagagtctgggtgttgcttttctgtggtgcgcagctccctcccccagtcttgttgctgtaggccctacgggaagtcaccgaggcagtgaccccggtcctgcctctccagctgctgtttatgtaatgagtgtcccggtgccgctgctgtggctgacat

SEQ ID NO: 31 - DNA, 6000 bp, Homo sapiens
ttcattcaaccaattgggttttttttttgaaacaaagtctctcgctctgtcgctcaggctggagtgcagtggtgcaatcccagctcactgcaacctccacctcccggcttccagcgattctcctgcctcagcctcctgagtagctgggattacatgcacccaccaccatgcccaactaatttttgtatttttagtagagagaggatttcaccatgttggccaggctggtctcgaactcctgacctcaggtgatcttcctgcctcggcctcctaaagtgctgggattataggtgtgggccaccacacctggccaatcaattgtttttaaccacctactgtgtccggaattggtgggttcttggtctcactaacttcaagaatgaagccacggacccttgccgtgagtgttacagctcttaaggtggtgcgtctggagtttgttccttctgacgttcggatgtgttcagtttcttccttctggtgggttcgtggtctccttggctcaggagtgaagctgcagaccttcacggtgagagttacagctcttaaggtagtgcgtcgggagttgttggttcctctcggtgggctcctagtcttgctagcgtcaagactagaagctgtagacctttgcggtgagcgttacagctcataaaaggagtggggacctaaagagtaagcagcagcaagatttattgccaagagcgagataacaagacctccccaataccacaggggatcctagcaggttgccgctgctggctccgcaacctgcttttattctcttatctggccccacccacatcctgttgattggtagagctgagtggtctgttttgacagggcgctgattggtgtgtttacaatccctgagctagacacaaaggttctccacgtccccaccagattagttagatacagagtatcgacacaaaggttctccaaggccccaccagagtagctagatacagagtgtggattggtgcactcacaaatgctgagctagacacagggtgctgattggtgtgtttacaaaccttgagctagatacagagtgcccattggtgtatttacaatccctgagctggacataaaggttctccacgtctccaccagactcaggagcccagctggcttcactcagtggatcccgcattggggctgcatggtggagctgcttgccagtcctgcgccctgcgcccgcactcctcagcccttgggtggtcgatgggactgggcgccgtggagcagggagcggcgctcgtcggggaggctctggcggcacaggagcccacggcgtggctggggaggctcaggcatggcgggctgcaggtccggagccctgccccgcggggaggcagttaaagccgggcgagaaatcgagcgcagcgccagtgggccggcactgctgggggacccagcacaccctctgcagccgctggtcggggtgttaagcccctcattgcccggggctggtagggtcggccggctactccgagtgcggacccgccaagcccacacccacccggaactcgtactggcccgcaagcaccgcgcacagccccggttcccacccacgcctctccctccacacctccctgcaagctgagggagccggctccggccttggccagcccaaaaaggggctcccgcagtgcagcggtgggctgaagggctcctcaagtgccgccaaagcgggagcccaggcagaggaggcgcggagagcgaacgagggctgtgaggactaccagcacgctgtcacctctcactaccatgtcctcagcactgttctaaggcctgaggatacaatggtgaacaaaccaaacatcctgctttaatggagcaggatgggaataatgacgataatcataatggttaatactttttgagtatttactatggagtcaagcatttatcctaccctcacaacaatctcagatatttgatactattattaacttactttatagatggttacacagagttagagcagggtccatctccattgtgactgacctcagtgcctctcagcctcattattttgtaaatttatttttttttaaattttatttgttttttgagacagaatctcgctctgtcacccaggctggagtgcagtggcacgatctcagctcagtgcaatttccgcctcctggcttcaaatgactctcctgactcagcttgccgaataactgaattacaggctcctgccaccacgcctggctaatttttgtatttaaaaaattggccattggcggccgggcactgtggctcatgcgtgtaatcccagcactttgggaggccgaggtgggtgcatcatgaggtcaggagatcaagaccatcctggctaacacggtgaaacccccgtctccactaaaagtacaaaaaactagctgggcgtggtggcgggtgcctgtagtcccagctactcaggaggctgaggcaggagaatgtcatgaacctgggaggcagagcttgcagtgagccgaaatggtgctactgcactccagcctgggagacagagtgagactccatctcaaaaaaaaaaaaaaaaaaaaaattggccactgactgggcacggtggctcacgcttgtactcccaacgctttgggaggccgaggtgggtggatcacctgaggtcaggagttggagaccagcctgaacatggtgaaaccccgtctctactaaaaatacaaaaattagctgggcgtggtggcacatgcttgtaatcccagctactcaggaggctgaggcaagagaatcacttgaacctgggaggcggaggttgcagtgagccgagatcacaccactgtactccagcctgggcaacagagtgagactctgtctcacaacaacaataacaaaaaaattggccaggctcatcttgaattcctgaccccgagttttctgcctgccttggcctcccagagtgctgggattacaggcatgagccacttcgtccggccctaatttatatatattttagagacggggtcttgctatgttgcccaggctggtctcaaactcccaagctcaagccatcctcccaccttggcctcccaaagtgttgggattacaggcgtgagcacctgtgcccagctttaggctccttattaacaacagatttggaaagtacattcttgtaagaaaaattcaaacaatacagataaagctcaagttctccccgcttgtccccatgcttagcagtctctccctagcatgcgttcgcttccagccctgttcctgtgtatccacacactatctgtccataaacattattttttatttgaggggcttcccatacatattgctctacaacttgctgcttttcccttaacatgatgtcctgaacatcactccctactgaacatatagagcatctgtcttgcatggatgtgcctagtttagttttccagttgtaaaccaaaaagcaccagatactggtctcaatcaatttacaagtttattttgccaaagttaagaatgtgtgcacctgggagacaggtctgtacctttctccaaagatgattttgagggcttcaatatttaaaggggaaaggtcagatattggggaaagaggaattttttttttttttttagacagggcctcactgtgttgcccaggctggagtgcagtggtgcaatctcagctcactgcaacctctgcctcccgggttcaagcgattctccttcctcagcctcccaagctgctgggactacaggtgcgcgccaccacgctcagctaatttttgtatttttagtagacggggtttcaccatattggccaggctggtcttcaactcccgacctcatgatccacccgcctcggcctcaccaaagggctgggactacaggtgcgagccaccgtgcctggcctgaaagaggaaatttttaaaaggcatgggtaggtaagaggcaaatggctgcattcttctgagtctttgataagcctttcacatgttagagggggatagaggactagtcacttatgcattcatctagctcagtgaatatgcatttttacataagaaaaaataaacatagggcagaggaagcaatgagatatgcatttgtctcaggtgagctgagagatgactttcagtgctgtcaaagcccagcacctgtgaagataagctataaatttacattgtcactgaaattccacacaactgttttagggtacagatttgggggcacacaaggaatttcctagtgggcaagttgtgagggccaggccatatctagcttttttatctttgtagttatcttgtttaagaataaaatgggaggtaggtttccctgatgcagttctcagcttgacttttccctttgacttagtgactttggggtcctgagatttattttcctttcacatagtaacctagagagagacactcagagtatttccaattgtcatctatgacaatcaatgctgccattcacaactttcccaaaaggtccgcagatcccctccccattacggagttggaaagtttcttcccaaaggatccacgtgatgaaaccagcgcaaacctttccaactgcaaatcgaatggcagctgcttccgcttgggcaaagcgtgatttttttttttcctccatcagtggatttttctccagaggaaagcggaagctcctggtgccgtccagaaggtgttaaaaaaaaaaaaaaaaaaaaacccaaacgagaaaacaaacaaaaaagctacacattaacctattaacctggatcccggagtcccagaaaacgggcctctgtctttaaggcgcttcggtcctctgggagttgtagtttcgtgggtcctggagcggcccccttcccatctcccttctggattgcagccccgctgcccttcaggaaagcgctgccccggccacccacgctggcctatgcggtggctccgaccgtgttttttgccggacgggggctcggccttgggggggcgcggaggtgaaactacacttcccggagtgcaccgcgagggtcgcgcagcctcgcgttaaagagcccgctccgccgagcgccgggcgacggcaggtacgtcagtccgcgagggtcgccgcagcgccccttgcgccccttgcgccccttgcgccccctcagctttccggtgcaccctccctgactgggagcaccgagtcgacccgcgggccgcccgggtcctgacagggaagagtccccgggagctctgcggtgccccgggagcccacaggtgtttctacgctcccgcgtccatttggcctgggtcttccaaggggagccccgcgacccggctggtgcggccggacctgctggcagctgggaccgggagggatgcgggcctcagaggatcctcaccctgaggcaggtggggccctggatgccggcgctgctctgattttactttgaggccgcttctcctctctcagtttacccggccagggctcagtattatgcacaaatctcaatgatgtgctcttgggtaatttacaaaacgattttactcccaagtaacttctttcggtctgttatttagaaggcagcaagtcagagtcctccgtgagcctttttttcctctttaaagttctaaaatgtgcagtccctgacccacctgtcttcaaaaggttcatatgaagagttcttagtactttattctatctctggctccccaaccctatcccagtcttggacagcgtggggctgaggacactaaaaaatatttcaacttgatctcagcagatgaggctgtattgaaagtgggtagaggctgggcgccaaggctcatgcctgtaatcccagctacttgggaggctgaggcgagggaatcgcttgaactcaggagatggaggttgcagtgagccaagatcacgccactgcactccaccctgggcgacagagcgagactacgtctcaaaaacaaaacaaaacaaaccaacaacaacaacaacaaaagaaccttagggccttagggcacactttctcaggacctcttgagattgtgtaactccagcaaactattaatt

SEQ ID NO: 32 - DNA, 6000 bp, Homo sapiens
aagaccacctgtaaattattcacatattctggatttgactatacacttacttttaccagtgagtttaaagaatgtcctttcatttcaacctgaagtattccttttagcatttcttgtaaggcaggtctagtagtgatgaacactgtcattttcatgtgtctcagaaaagtatttatcttttcttctgaaggacagctttgctggatataatatttgtggttggcagtttctttcttttagcactttgattatattatcccactctttccaggcctgcaaggtttctggtgagaaatccaccagatggtcttatggacatttctttgtatgtaatgaggtgcttttccgtgtgtgtgtgtgcatgtgtgtgtgtgtatgtacatgtatacatgtacgtacatatatatgtatgtacatgtatacatgtacgtacatatatatgtacgtacatatatacatgtacatacacacacgtatatatcaatagcttttggagtacaagtagattttggttacatggattaattgtgtagtggtgaagtctgagattttagtgcacctgtaacccaagtagtgtacattgcacccaatatgtagtttttaaaaatcccacatcctcctcccactctcccctcttctgagtctccagtatccattataccaatctgaatgcctttgaatgctcatagcttagcttccacttacaagtgaaaacatagatatttggttttccattcctgacttacttcacttagaataatggcctccagctccatccaagttactacaaagacattattgtaatgtctccatcttcatttctctttctttctttctttctttctttctttctttctttctttcctttctttcttttctttctttctttctttctttctttctttctttctttctttcctttctttctttctttccttccttctttccttccttccttccttccttccttccttccttccttccttccttcctttctttctttcttttctttctttttgagacagagtcccgctctgtcacccaggctggagtgcagtggcgcgatcttggctcactgcaacctccacctcccgggttcaagcgattctcctgcctcagcctcctgagctgggactacagccgtgtgccaccatgcctagctaatttttgtatttttagtagagacagggtttcaccatgttggccaggatggtctcaatctcttgacctatgatccacccgcctcagcctcccaaagtgctgggattacgggtgtgagccactgtgcctggccctccatcttcatttctgatttagcttatttgaatgttctctcttcttttattggtaaatctagctaatggtcccctgagtttatcttttcaaggaagcaactttttgtttcattgatcttttgcattttttgtttcaatttcatttattctgccttgatctttgttattttcttctgctagctttgggtttggtttgttcttgcttctctagttccaggaggtgtgactttaggttgtcaatttgtcatctttcagactttttgatgtagatatttagcaccacaaactttcctcttagcactgcttctgttgtatcccagaggttttgataatgtgtgtcactgttatcattcgttttgaagaattttcaaatttctatcttgatttcattgttaacccaaaaatcagtcaggagcagactgtttaatttccttgtttttatatagttttgagggtttcttttggagtcgatttctagtttgattctggtgtagtctgagaagatacttgatatgattttcatttttaaaaattaattgagacttattttgtggcctatcacatggtctgtcttagagaatgttccatatgctgatgagaagaatgtatattctgcagttcttgggtagaatgttctataattatccgttaggtccatttgttctggagtgtagtttaaattcagtgtttctgtgttgactttctgcctcagtgatctgtctagtgctgtcagtggagtattgaagttctccaatatcattatgttgctgtctatctcttgtcttaggtctagtggtaattgttttatgaatctaggagcttcagagttatgtgcatatatatttagggttataatatcttcctgttgggtcaatccttttatcatactttctttgtctttttgtttgtaaactgtttttctttaaagtttgttttatctgatataagagtagcaacttctgcttgctttcggtttctatttgtgtggagtatctttttccacccctttaccttgattctataagaatcctttgtattaattagctcagcttcttgaagacagcagacatttggtttgtgattttttttttaatccattctgccaatctgtatcttttaagtggagcattaggccatgtacattcaacattaatattgaggtgtgacccaatcatcatgttgattgttacctggatactttgttttttttattgtgttattgttttataagccctgtgagttttgtgtttttgagaggttctattctgttgcatattgaccttttatttcagcgtttagaattccttttagcatttcttgtcgggctgatctggtagtggcaaattccttcagcatgtgcttgtctgagaaagactatatccccttcatttatgaaacttagttttgctgtatacaacgtttttggctgagagttattctgtttaaggaggctaaaaatagggccccaatcctttctggcttataaggtttctgctgagaagtctactgttagtctgatagcttttcctttgcaggttatctgatacttctgtcttactgctcttagaattctttccttcatgttgacattagtaatagcctgttgactgtatgccttggagatgtccattttgccatgaatctccccgaagggctttgaccttcttgtatttggatgtctaaatctctggcaaggctagggaagtcttcctcaattattccctcaaataaattttccaaaatttttactttttcttctccctcaggaacaccagtgattcttagctttggccattttacataatctcatatttcttagagactttgttcatttcttttagttattttttctttatttttgtctgactgggtttattcaaaagccttgtcttcgagctctgaaattctttattctacttggtctagtctgttgttaaaactttccacttgttttgtaactccctaaatgtgtctttcatttctagaagttctgattgtttttttttcctctaaagtatctatctctttagaaaaattttcattcatatcctgaatttttaaaaaactttctttatattggttttcacctttttcttgtatctccttgggtaacttaataatcaaccatttggattctttatttggtatttccaagatttcatcttagtttggatccattgctggaaagctaatgtgatcttttgggggtgttatagaaccctgttttgtcatattgccagaattatttttctggttccttctcatttggatagactgtttcttctaattatttttgaatttatttttgattcaaccgtttctttctaatttccttttttccaccttatggatgtgacttcaatgattatagcttattgtaacctaatttggctctgggtgcttttggcggtgaagactctgtataagttccttggttatagagagtctttgtatgatggttttctcagatgtagtagcaatgtgcttcgtgtgtgagcaggttgactgtctcttgtggggttggaatggcaaaagtctctgaagctcatccccagtggtgtgcacttatttatttattcatttgttcattcattcattcattcattcctccagtattactgggttgaacagttcaggcttcaagtcagtatgggagttgtccctgggtaaaaactgggtgtgcctaaaacaggtagataaatacaatacctaatggagggcagaggtcccagccttgacgtaggcggctggagaagctgtcattgaaaaacactgaggtcttttcagggggaaggaaggggctaccccagctcccatcccaggccagcaggagaaaaaactgcctcccattcacactcctgacccagtgttctgtccattcaaaccaggcagacaccactttccagctgcagaaatactgatgttccatgtagagagggattataattacccctcatgcaagcctgaaccttgagggcacttgtcctatgaggatgcagtcaccctgaagtgttctagaaaggctgtctacagatgcacccatgccacgctcttgtgggagaagcccaagctgtagctgcagtggtgggtgaggaggaaaagtctccttctccaagacctgtcacaagcaccagggatgcctgactgttgtagtagagccacagactttcccttctgagttcagcattgcacctgtgcctctgctgaaaaaaacttcccacaagcagaaagctatgggactcaagctttgccatctggattcttttgtcccatgggttactcctttgatgtggtgcactcccccttcccctaggagtaggagccctgagggccagactgttgtgaatgctgctgcttctctgggtctagccacccagtggggctgccacactccaggaaagtgccggggaatgtctgcagggggtccagtgatgcgacctgccctcaaatttccagcagtaggtaccagcatctgttctgatgggggtggcagggaagtgacatagactctgtgagattccttataaatagccttagtgtgttggctttctcacacactagctatagtaggaatgaactggtcatgtggacagactcaggacctactgattagctgggggtaatgcaggcagtggtgacagatggggtcatgcgtaagttttctccttcctgggtgctatgttattctgccagcagatgctgtaatggactgtgttggttggcctccaggcaggaagtggcacttggaaaagaacaccagctgcggtggtagcagtgggatttgtgcttcttatgttacccaggtgaggtactctggtgtctcagacaatgcgtgaggccatagagcttcccaaagtttctgtcctttgtgttaagctatggagtagggggtaaaggggcaaagccaggtgggggctgggtcacgtaagtacatgctatggctctccatgtgtgggctcaagcagaggccccagtggggataagagggcagtcctcttgccgcaggggtaatgttccagggaggagtgcaactgcctgtgctgcacagaaagtccacacagggagtggggagtagcaggtgacagtaagctctgcccagttcccatgcacttggcaaggtaggtctcacaccggtagtgttccactagtagcagctagctaggttccaggcattctgctctcagaactcaaaactgccccaggccataagccttcccagttgagacataccatggctttcaggccacgccccttctggtctgcctgagaaacaaaggtacccagctcttgtgctcgtgagtataacccactgcccactcacccctcggttctggccaagggggttcatcgtcactcgagattatatcacaaatgtcaattgggaacctctctcaacctatgacagactactgagtttgctggaagatgtccacaaggtcacctgtgaggtaggacctggaatgacttccttctatccctgctggagaccgagagcacatgcaatgcacatcccaatgctattccttctcatgtattccccagtgctcactaaatcagcttcagtgctgggtagggttaagacctttccctgtggcctggattgccaagttctccagtgggaatgtatgtcccagagacagtttatccccctcacactccagggacttagaattttctacctggttcacagtataggctgcagccc

SEQ ID NO: 33 - DNA, 6000 bp, Homo sapiens
atctatgctgctaaacattgtagctaaaatatctaaaatatttcaaggtataattataagcttttgaataaataaatgaatatacaaatctgccaggaaaatgaggagtgaaaataacataatcctttgatctagcgcaggaaggatgaggacagtttatttgagagcctgggatggggtaatggtttggaacattctagataaaaggcatagcaaatgctgaaacataataaatgtgtaggggaacatcacagggtgactttctgagtgggctatttttttatgtagtaaatggaaatgtctgtttaaaataaaggcagtcgtatttattcagtgacaagtctcagattacctgtattatgttctctttatttcatgtgtggaaagaaaacttgttttcctctaaaatgtcagttcaggattctaacacttatccattctcccccaaccttctccagttcagggctgtacacgcagatattgtccaacacttacttacagtacttggtattatgtatgtctggtttctttagtgtgtgcatcatgcttatctaggtttgtttgtgttttaatacagattcctgggatccccttctaaaacattaaaacagaaggtcggggctaattaactagctagctccctaggtaagtcagatacacagcaaatgtgggaactactgaattctaatctgaacccgtgtgtattagtcagggttctctagagggacaggactaataggatagatgtatatataaaggggagtttattaaggagtattcattcacaagatcacaaggtgaagtcccacagtaggccatctgcaagatgaagaacaaggaagccagtctgagtccttgaacctcaaaagtagggaagccaacagtgcagctgccaatctgtggctgaaggcctaagagcccctggcaaaccactggtgtaagtccaagagtccaaaagctgaagaacttggagtctgatgttcaagggcaggaagtatccagcacaggagaaagatgaacactggaagactagtccgtccacattcctctgcctgctttaattctagccacactggcagctgaatagatggtgcccaccaaggttgagggtgggtcttcctctcccagtccactgacacaagtgttaatctcctttggcaacaccctcacagacacacccatgaacaatactttgcatccttcaatccaatcaagttgacattaaatattaaccatcacaccttgctaacaaaagtgtggtctaccaacagcattgacatcacctagaaacttgttagaaattttgaatttcaggttccatcccagatatgctgaatcagaatttaaacttttctaagatcctacataatttatgtgaactttaataattgtattgtagtaagaacacaacataaaatttactttcttaaatgtttaagtgtgcaagactattgttaactgtaggcacaatgtggtgcagcagatctctagaacttattcatcttgcataattgaaattagcaatttcccttttctccctgactccagaccctgaaaaccaccattctccttcctgattttctgagtttggctattttagataccttatataagtggattcatgcagaattcttcctattgtgactggcttatttcactcggcataacgtctttgaggttcatccatgttgttgcatattgtggaaattccttatttttaaggtggaataatattccattatataaggatggctattatattttttaaaagacaacaagtgttggtagagatgcagagaaaattgaacgcttgtatactggtgatgagaatgcaaaatggtgcagccactatagaaaataatatggagatttctcaaaaaattaaaaatggaaccaccatatgatccagcaatcccacttccaggtatttctccaaaagaatgaaaatcagaatcttgaagagatattagcacccaaatgttcaatacagcacaattgacaatagtcaaagtgtggaagcaatctcaatatctacggaaggataaatggatttaaaaaaaagtggtatgtattactagatacataagaacttttaagttcgagaagcaaattctgatccaaaccactgtgctcctagacacttagcagcaacatctcctgggaacttgttagaaatgcaaattatttgcctcaccctagatctgaatcagaacccctctgttttaacaaacccagaactctcaagtttgaaaaccactcatctaaactcttatcctgtctttgaatcgttgatccacaactttatcctgcctttagcagtgaccttttctaattttaagcaccaccacaattctacctctaaagtcagtggaaattcagcagggctagagaaggacgaataaaaaaaaacatctatggtattacatacgtacggaacaaaatgctgcactttgtccaaaaattggaggatttcctttttttcccaaactgtacatgggtttggaagggctctctaattgggtgaacataaaagccatgtactggttggctgtacttccacatctgtggtttttcaatagctattctagaaaaaggttttactcccaccttgacttctaaattttaaaacgcctccatctctgaaaaacacttttcaataattgtcaattagagtgaggatagtagggtaagcagctgctttagtttatttaaggaagctgccagatgatgtcagctccaggtgtttctaaatattaaggtgatggggtgcatccctcaactttatagatagagaaagcaaggggctgtcccccatgtttcttctttaaaataaaaacccacaagtctactactttccaatcaatttcctatgatttatcttagagcatttacatctaatccaaacactaccagatgaaggttgaaaaaggattgttagggaagtaaagtaagatggcttcagagtccctgtgtcttctttctcaaactccttccataatttaaatgctaaagcatgataaggtttttaatagactattttgttgtgtgtgtgtgtatatatatatatatctatatctaaggtatacggcatgatgctttgatatacatagtgaaatagttactagagttaagcaaattaacaaattaacatgtccatcatctcacatagttacacaattttttcttttcattttttcttttctttttttttttttttttttttgagatggtctcactctgtcgcccaggtggaatacagtggtgcgattaagctcactgaagcctggacctcccaggctcaggtagtcgtcccacctcagtcttctgggtagctgggactacaggtgggtgccaccacacctggctgcaatttttttttaatggtaacagcacttacagtctactctcttagcaaatttccagtttaaaatacaatattattaactataacgctcatgctacattagatcattaggactcattcatcctatataactgcaactttgtacactttgacctgcatcattccgtttcttccctgcccctggtaaccaccactgtttccacgtattccgtgtgtgtgtgtgtgtgtgtgtgtgtgtttaagattccacatataagtgatattgcacagtatctttctttttgtgtctggcttatttcgcttagcataatgtcctccaggtttatccatgttgttgcaaatgtcaggatcgccttctaaaggctgaatgatattccattgtgtgtgtgtgtgcgtctgtgtatatgcgcgcgtgcatgcctatgtatgtattacaatttctttatccattcatcgttaacagacactttggttgtttccaaatcttcgcaactgtgaataatgctgcatgaacttgagagcgatttctgagatcctgatttcatttcctttgagtatacacccagaagagggatagctgggtcactggctttagcaacgatttttgcaatatcacaccaaaagcccaggcaaccaaagcaaacctagataaatgggacttcatccaactaaaatgcttctgcaccgcataggaaataatcaacaaaatgaaaaaacagcctatagattgggagaaaatatttgtgagccatatatctgataaggggttaatatccaaaatacattacgttcacagaactcagccaaaataaataaataaaacacccagttaactaacgggcaaaggatgtgaatggactttttttttttttccagaggaagtacaaattgccaacaggtataagaaaaggcgctcaaaatcactaatgaacagggaaaagccactaggtatctcctcacacctgctaggatgactgttataaaaaagataagcgataataagtgtcggtgatgtgcggagcaaagggaaccttgtacactggtggtgggaatgcggactggaacagccattatggaaaaccctacggaggttcactcaaaaagttaaaaacagaactaccagcccagtgttatccgtccttcgttaagttcaaagtcacggtgccacttcctttcccatctaaaggggactgctcgcgacccaagccaaggcccgcaagtgtggctctccctgcggggagagtagggcaggaggtggatttccaggccagaggcttccaggctgggcccggaccccacgccgaccccggccccggggggggctcagcgacctcggcgcctcctcaggcccccagtgaacctccggggcccataaaggctccaggccggctccccggaggcccaccagcgggcgtctgggcctccctccgcgccgcgaccgccaggaggcgccgcccgggagaggaagtccagctgggcccggccgggcttcggaggcgccgcccgggagaggaagtccagttgggcccggccgggcttcagaggcgcagggcgggagccgcctcgcgcagggtcctccccaagccggcgccaggccctgccctcgtccggccctgccctcgtctggccccgcccgggccgcgagcactggcgggttctgggtcctgtgaccggtcaggcggcgtcagcgggcgcggcggagggctggccggcctcgggggagtttccgcggccgccgggggcgcggcggcagagcgcgaggccgggcagggggccagactcggagtcgaggcgcgcccgacagccgcagcgctcatggcgggcggaggagccggggaccccggcctgggggcggccgccgccccagcgcccgagacccgcgagcacctcttcaaggtgctggtgatcggcgagcttggcgtgggcaagaccagcatcatcaagcgctacgtccaccagctcttctcccagcactaccgggccaccatcggggtggacttcgccctcaaggtcctcaactgggacagcaggactctggtgcgcctgcagctgtgggacatcgcgggtaagcgcggccgcgagtttcccactccagagccccgccgggccgcctggctcctctctgcttcttttctttttcttttctgcctgaactcgtctgcctgggtacctttaggagaagagagaggcccaatccaagggcgagatgcgatggacgcggtcggctggactcggtggggcccagaggatgggatgggcagtaggagttggagcaggtcctgcacgccagagctcgctctcctgaagggaggcgaggaggccagggggccttttccagaagtttgaactctgaataatgcaagtatatcatacatacaccaggactagttgagaaggctgctttggagcgggccggcgcctctcagcctcaactcaagttcagagggattgggtgacttaacccgaagctgcactcctagttagtgacaccaccaagaccaaaagccaggttcctttccagatcattttccaccacccgccttggctctgagactggcctttgtgagggaaactccattcctcaaatactttgctctcatcggaagccgaggacagacactccgtgaagatttggg

SEQ ID NO: 34 - DNA, 6000 bp, Homo sapiens
aacttaaaaggagtagaccaaaattttaatgctgtaacaatttgctaagtttgtgggtgaaattttctttttatcactttcccataccgtttgtaatcttgccatattcttttaaaatacaaaaagtatttcttagaaaatacatattctgcgtgcctctctagcagatgtctctagaaagaaatgagatagcgcagaagacacgccctagactgcagggggctccatgagcccagagcctgactcagcagcgtgagaacaggggcgaacctgggcatggggcactctgcagcttgatcccgccctggatgggtcccttctttacctgccaccgcctcgctgggtgttactgagtcccccgccagcaggccgccctcggtgggcgcagcgcccctcccagtcccggaccatgctatccccaagagaccctcctcgcgaaagatctctctgggagaagggaggagctgcaaggggccggaaagagttacagggcgcaggcctctgcgacctcgccctccccatgcccgcgcggctccctactcccgccccgcgggccgatgacctgtacctcttgcaggggatcagcgccttcctctcgtccagcacccgcacgcgctggttgagcccgtcgtaggagagcagggcgcggctgttgcgcccgctactttgctggtacataacctggcgcccctcccactgctgcggcgcctggcacgggcgcggggctcccaccgcccccaggctgcacaggccgcacagggtccaggcccagaggccgcccagcagccaggcacccagggcgcccgggacggtgcggaggggagcgcgtcctggcatcgcggtcagccttccccggcccgagggcaagcccaagcccaagggggcgctgaggcgtccgggatcagagtggctcccgccggctctttccgcactgtgccgggagtgtggtctggaccaaagtgcttcctgtcccttcggtggcctctgccgcttttgagatccggacgcgcgagtcccggtagccgggaccagggcccggggaaggctccagtgaatcgcgcgggagctatttctgcctgggccactgcctgctgccactgcctgctgccactgccttctgccgcttcggttttcactgctcactgctgccaacaggaaatgcagtggcagtggtgccactagcatcctgggaggcatcgtgttttaagaggggggatggggggagactgtgctgagaagtgtgtttctccactaacttcagtgttcaacaggtaatcacacagggaggggcaagttcaaggtcaagataggaaaagcagagctgctgcgtttgctgtgcaaacgtttgccccgcctacattgcccctcgacaaaattgcaaacttcttcctccaaattaaaagtggaaagacgagtcttttcctgaagaaatgatactagctattcatcatggccgctcctcagctcccattcccagtgaagagtctaggagactagtagacagccccttgcattgggcctaggactcatggacatagcctcaaggtcacattgcagtgagactgctcctcccatcgcctggcaataccaccagccgagtggtttgggtgtctggggggtttcgcttcttcaagaataaggttaattgggtttatagttatgtaatgttaggatctataatatggaatgagcgaggctcacacacctgtagtcccagctactcctgaggctgaagtgggaggatcgcttgagcccaggagttagaggttgcagtgagctatgatcatgccactgcactccatccagcctgggtgacatggcgagaccctgtctctaaaaatatagtgataaagtatgaaatcaagaaaaaagaaaggaactaaaaaaatgtatagcgtctttccatttgaactgcatttcaaggatgattaagattgagccaggtgaaagtgggagataacattcctgaatgaagggcataaggacaagaaaagaataatgctggggttcaaggacaaggtagaggagtactctgaagccatagcactcattttaaggaatttgtcattgatattgaggactgtgggaactatcaatcaatgtaaagctagggaggagcatcatcaggcatatgctttagaaagcccacttagacaacagaaagggtagggccagagggaaggcagggagaggaggaagctactgttatcatcctggaaagagatgatcctgactcagctaaggcagcgggagtggtcatggaaagggtggaagacaggtgggagctgtagagaagcatttcaactcagagagagaggtttctggtttgggccactgggaatccagtcctgagtgaggagagatgatcaattcattttaggattggttgatcttgagctgactgtggagtattaaggtggaaatatccaagggacagctggataaatacttctggaaaccagcagagcttttggattaggaagccataggtacataggtggtaaatgaagccgaagagtagaacagtggttcctggggaaatttcacatccccctccccagcaaagaaacatttggcaatatctggagacatttttgatgatcacaatgtagatggggaggaggctaccgctgacattttgtgggtagaggccaaggatgctactaaacttcctacaatgtgcagtacagccacctcccctctcccaaatgaagagaaaattatctggccccaaatgtcctaagtgttgggggtgagaaaacctggagttcaggggagtgttgagtgtgagaagaaggattaggatggagccccagagagctccagacatttaaaggatgggcaaagaacaggcacttgaggagaccaaaaggagtcaccagagagaagccactgaatgaggcaacttcccgagccttgttaaataaatgtaaggcatggaaagaatggactgaatgctgaagtagggtgttctagaatcacagcctccctggaagtcccgaagaggagggacagttgacaggttttcctgatgcatccttctctgctgccccctgtctgtcgaaccaccagagacactaccaatgggccgaatggggcaggcacaaagctttaggaagaagggctcttcatttcctcttaccttttcttaaagggcatgcctcagagaacatcagggaagcccataagactttgtgacttggtacttacatagttaaacagatgcagcaggttcaaactggctgcagaaatttgagccctctccgagtttgccctgctcagattcataggaaaagtgtagggtagttcagctctttctcttgctccccaggtaggaactccagctgaaaatctttttcacccagtgaagggtttagactcattggagtttactgctagaaatggcttgagatgtcatctgggctttcctcctcatgtgatattttactagcctggcttggcatctttggaggtggagactggttctataggaactagattacctttctagagtggcttggcagtgtaagaacaccctgggcttcccctaaataagaaccagactctttggatgaatcctgaaatgtatttgtctcatttatccttttcacttactatgtttaattcatgttccctaaaaaataagataatgcatttaaagttcttagcttcataccttgaccattgtaaattcccaatagatgtcacttgtgcttgttgtttcctcagctgttttaatccttagtctttagttttaatcctcagtcaaaactaaactaattgtgtaggtttaagctttggagagaaaaaccatgtgccttaaattcaagttaaactatgtttttaaagattaacattcagagaacatgtttccatattgctgatgccctaataaatagcatataccagaagtcttaccacctgaagattgatatacatcaatctcatataaataaatcctcccttttctgtagatagctgagccagcaattggactaccttttcctaatgcaagtaagataaaagagaaagcaaaacatacatacttgcatcccatagtacacagcttcttactcaactcaagcaacagtctctgagcacatcaaaaatcaagattttaggctgctgaggtggaaatcctttggcatgaaggatcagagcaggggagacctttcagattgtggtgcccaatgttttctcctgggttccactaatgctgcagaggggaacagggagttagaaggaagaggaaatgttagaagacatttctgaagctggaagatgctagcacaccttcccccagttctgttaacttcctggagcagaaacaaaccaagtgttatactggaaaaatttcggcccaaactgtctactagcaacaacaacaacaaaccacactccacacaactaagggcggagtgggagtgatttatacaacgtgaccctcctgttctgacattcactgcactctcgcctgccttgcaggacattgtcccaactgtcctcagcgctcctcatgccccctaccggagaaagcaaatatatttcagaattagagggcagcagaagctcctattttcccccaactctatacttggaaaaactctaaggcagagggagcaaagttcagttttcagccaaagagtgtctttctctctcttgaaattctctcccgcaccctcttgtatccggtgtcgaaaacaactgccagaggttctttttcttggtccgaagaaaaaagactggccagactaaaaaggagggactttagggggaaagcaggcttccagccctgggctgcggcccagagggggtgatgtcaccgcttctgcaccgacgggcctgggggtggggcggccgagggggagcccgcgccgcggctgcagctgccaagggagcgttccgagcccacgtcaggggaggtgtcgggataaatagggtcccgcaatggccgtggctggctgcgctccgagctgcggagtccgggactggagctgcccgggcgggttcgcgccccgaaggctgagagctggcgctgctcgtgccctgtgtgccagacggcggagctccgcggccggaccccgcggccccgctttgctgccgactggagtttgggggaagaaactctcctgcgccccagaggatttcttcctcggcgaagggacagcgaaagatgagggtggcaggaagagaagggcgctttctgtctgccggggtcgcagcgcgagagggcagtgccatgttcctctccatcctagtggcgctgtgcctgtggctgcacctggcgctgggcgtgcgcggcgcgccctgcgaggcggtgcgcatccctatgtgccggcacatgccctggaacatcacgcggatgcccaaccacctgcaccacagcacgcaggagaacgccatcctggccatcgagcagtacgaggagctggtggacgtgaactgcagcgccgtgctgcgcttcttcctctgtgccatgtacgcgcccatttgcaccctggagttcctgcacgaccctatcaagccgtgcaagtcggtgtgccaacgcgcgcgcgacgactgcgagcccctcatgaagatgtacaaccacagctggcccgaaagcctggcctgcgacgagctgcctgtctatgaccgtggcgtgtgcatctcgcctgaagccatcgtcacggacctcccggagggtgaggccgtaggaaggatggagggaggcgaggaggcgcccggggctgtggctgccaatcgagaactgggcggccacacctaaggctgccaggggcgtctgaggcttgtaggaggtgggaaagaatgggggaaacattttcttcagaaaaagtctggtttctcccataggaattttaggagctagcggagagcactgcaccccataaagaaaaaaaaaaagattttgcttacaaagggagccttcgatgatgtttgcatttatagtaataacagaaatgataatagcagtaaacaggtgttgctaggtgtctgagc

SEQ ID NO: 35 - DNA, 6000 bp, Homo sapiens
ctgattaaaacacagattccgggcgggcggcggtggctcacgcctgtaattccagcactttgggaggccgaggcgggcagatgacgaggtcaggaaatcaagaccatcctggctaacacggtgaaaccccgtatctactaaaaatacaaaaaattagctgggcgtggtggcgggtgcctgcagtcccagctactcgggaggctgaggcaggagaatggcgtgaacccgggaggcagagcttgagtgagccgagatcgcgtgactgcactccagcctggtgacagagcgagactccgtctcaaaaaaaaaaaacaaaaaacaaaaaacaaaaaacagattccctggtacccccaccacagacctttccagagaagtctctgaggctgagcccaggaatttactctagtagccaacttccgggatgactgtcgtaaatactacaatttgagaactattgctctggaggctgaattaagcaatgagcatactgatgaatactcacttttgaaaagcctaaaggtagacctccatgaaaactattcgtaggatttcctttcttcctttccttatcttaaaatgatataatctttttgaaaaaaaacccacaaacctgcgtgtatatcatttcacttcaatgcataaatgtgacctatacctgcataaagactattttcagttttttcctttttgcatggctcccaccccttttctctgcccttgtctccaccaggcccctagtaatctgtactgcaacctccttgataatccttcatatatacccacaaacatatatacccaaatatatataaataggtgttgctttttatattactaaaatagaaacatcttttccatgcttttctgtaccttgcttttctcactcaaaaaaacctaaaggaatattcccatgtcacaaaatttgactctaatttattcctttgaatggttacatatgacttcacagtatggataagtcataacatactcagtcattctccattgacaggcatattttgtcctagcttcctgctgctataaatgatacaattaacaaccttgggggcagggagtggtggctcatgcctgtaatcccggcaatttgggaggccgaggcgggtggatcatgagaccagcctggctaagatggtgaaaccccgtctctactaaaaatacaaatacaaaaattaactgggcatggtggtgggcacctgtaatcccagctactcgggaggctgaggcagagaattgcttgaacccgggaggcggaggttgcactgagccgagatcttgccactgcactctagcctgggccacagagcaagactccatctcagaaaaataaaaaaaaaaaaatccttgcatattatacatgtgctttatttctagtggatagattcttactcctaggatagagaagtgtatgtgtttgctacaataacaattaatattagtaattcctgcagggttttatgtattttcatttttgataactcctgctaggtttctttccaagtaagacagtatttatttgaatggtaatttttatgggtatttacttgcctttcacaatttctcattataaaaatttatattgataagtgaggtgtaattagttatatacatttatattattgaattttaaatgttcttcattttacaagtaccaatttttccaagtaccctagtagtctaccacctgagtttcattaaaattgcacaaaacagaaaaatacatattagttctgagatgctataggggtataagcaagaaaacaaaacacaaacaggctgccttctatgaaactatcttccaaatattttagatcagaagatggacaggtagatggatagacagagatatgaaaaaaaacctccagtatttgttttgacttgccagccaccaaatctggtagggtcagtttttctgtaatgttaaatatgcaggactggtcaaggtcaaagaacattttctgggaacaatagccattctcttcattgtttttttaatgacatggagaaggaaaaaaaaaaaaggagagagagagagatgtgaccttactaggtccacttcaacaaatccttgtttgattttaacatctctaagtgtccagcaaggcatcaaaggcacacaggcagtttaccttacagccagttccaaagtgccatttacaattcaggagaaatgacaggcttcaaaaggggcagtttaaggaagacaagagcagtagagagggggatagaagaagtgatggagaaggaggagagaaaggataaaggattaggtctgtgagctaacagaggaaaacagcttaattatggaagaaaagacacatgcataggataggtcgaacaggcagagttgctgtggaagcacattccaggaaaatcttaagagattactttaataataaaccatgcattcttcagcaagccatcacgggattaactacccctttcctaggctgggagcacagtcatttgttttattttattttttccttctctctcacaggcaggttttctgcaacggacaattgccattcaaagactattgtttttcaaacattgaactgacttttcctccccttaattttctaaacataaatttcagtggtgataagaaaagaccattatttaggcagggtaaatatctgggtgggctttggcgtgattctccagagggaaagatgttcattttagacttgttgaaaagtgaacaacttagatgagacagagacaatgtttcacgagggataaaaagagttaaatttcttttctttttttttcttaatgtgagcaggacattgaattactgccagaagcaatatcggtgccctagagatataaaaatacagttcaaaccagaattctccactgtcgactcttcagatttctgtgcaaaataagaggtgtctattttaagttgtaagtgtgagcccactgctcttaaatgaactgttttcatcaaagtcttctcttgaaactacaactcatagcagatgaaatcattttcttcctctggcttcttagacaaatcccttccatttggtggggtagagcaaacataagttagtatttcttggtaagagtctttcaaaaaaaaaaaaaatagaattgagtgagcacttcttagtctagaaaatattacatattgaggttaaaagagacacccatgtctttctaattatcaaagtctctatttgcctgaagtcagcagccctttttccagctacctagccaatagaaatgaaactggacttctagattttagaaacaaagccttgtgttctaaaatgtactagaattacatttctctgcataaatgttataaatagaatactatcctaggactaaaatttgtatacttcctgtcattcacacaaagtcattttttaaaatagcaaattacctctgaggaatattgaaaactgccagcatggccctccctgcctccacacccctaggtgtgtcaggggatgagaaatagtagaggctggggaagtagaattctgggccagctgtgctgctctgcacccctcagtctccccgaacaacggttgtttcaagcctgacctacttgagagcagacattgccactcacattgagctaccccaaattacacagtggctttgcagtcgaggctaggcacggaccacaaaatatatccttgatgtcccacgagccctatttgaaccctcagtttccagaggtaaaatgcaaatccactgtgttgcttactcgataaaatcaataaccccctcccatccgagatacaatttagcattttcacatttactacgtgctgcctctgactttaaacaattaaatttttttcttaaaaaaagggaaaagagacacgtctttcacaagagtaatttcagaattctccaaaaagcaacagagcttctgtggatgttttacaataattcttgattttaaaatatggagaaaatgaattctcagcttgttaacactcattaggatttgctgcggagtaccttctaccgctcagcactctacgttaacatttttaaatattttatttcttgcagttcatgtttttcctagagttataggaagtgctatggaaattcatgcagataaagtcatgttatgtgtctacatataggtgtatatacactgtaagggaagcctgtatagaatctctgattgtatcagaattataacttatttgataggctacatagacgtgaacatgttttgctcatatcgatttcagagagaatattatttttatatccatatatatgattatatttcataggtaaatacagtatgtttcacatatgcacacatagatttcccactaacttaagcgcatttgcatctgcaatgagggagacactaatttcttctaaggggagcaaatccaatcgcgcgatcaactttagaaactgcagatctgcgcaggaaccgttgtcccttgtcagaaaagtcaggagtaaaggcagtcctttgttcaaagggccccaacgggttggttaggatgactccgtgtgccacatcactcgcagtggcaatccagggaacggatctgtgaaacgaagctcggtggatcccacccctttcctccagagcttccctttcctgtccttatttgcacccgccccccgcccgcgtcggtctggggcttttgacttctccccgaacacatttcccctcccgtcgctgggtccctgcgatcgcccccagctggtggggctcgcggagctcaggggagcggggtcctctgcgccgctgcagcgcgagttaataaacagttaagtttggaagactctgcagacacgttgagggggagttaccaagcccaggcagcaaaaacatcctggcacattcctggggagtcctcagctgccagcatctgattagaaccatatctctcgccgggagtggccgcgcggctccgaagctcccggccggcggctatttaagcgaggcccgccgcatccgctgcgctgtagcctggaggctccgggcgcggggaagtcatgctcgcttcacggaggcaatagctagccggtgagtagcttcgaaacccttcttccctctggctccattttttttttaaagatctccttctctcctttgctccccctctctcacccccccgccccccgctacccttctttgagtacagaccttgggctgtggggaatcttagaaatgagaccctgtgcttggggaaaccagcagttttgtggcctgacatctgaggaatgcttccgcggaatgtatttacctttcgaatccgactccagatgcccagcttgtgacatttaacaaacgcctccttttgtgtcgtgtgtgtgtgtgtgtgtgtgtgtgtgtgtgtgtgtgtgtgtgtgtgtgtgtaaaaggtctgcgggcagccctcctaggacactgaggtggctgctgaccgcctaattaactcctcgaagggtgtttatttttgctgtgtgacaaaggctggggacctggcttgtgcccataaggagctttttcctggtgactgacaacatatggcattaaaatgtgaacttttgtcttacaccggcattcctaaggaagtatctacccaagggacttaagaaacttgttttatatcccccggcgcagggagcatggtttatatggtgcttgcctgcctgttgtaagctggttaaaaagattaagtaagaattctaaaaaaggggggaaaaatgaatgggttaaaaccgtggagcctcagtcaacatagcggttttcatagcatagagctgactctgttatttgtttctgctgtctttccctcttgacttaattctgagcctggaattctggtccgcagacagtttcagcagggagctgagtccaaagggaaattcaactggattaaaaacacttaaggaatctgggtgttatctccaccccaaccaccccccaccttttcccctttctttttagtttttgtttggaaggaagagagccgctctgtaaaccgagaagagcagaaacaa

SEQ ID NO: 36 - DNA, 6000 bp, Homo sapiens
tttctaacctgtatcatttttcttatctcaataacttcttttaacatttctcacaaagcagatctactggccacagaatgcctcaattttcatttgtctgagaaaaccttatttctccttcacttttgaaagataattttgtagggtacagaattctaggttgtaggttttttcccctcaaagtgaaatatttcattccactcttttcttctttgtatggtatctgagaagaagtcagatgtaattcttatcattattacttaaaagattgcttctgttcctttctctcttctccttcccttctttccttctctgtatattacaccttttatagttgccccatatttcttagatattatgttttggttttcttctgtgtttttttctttgattctcagttttagaagtctctatttatatatctgcaatcgcagggattctttcctctgccatgtccagtctactaataagcccttacagacattgttgacttctgttccagtgtttttgatctctagcatttctctgattatttcttggaattgccatctgtctacttacattaccaacctattcttgtgtgttgtcttatcatagtaattgcagttgttttaatttcataggtattgtaatttcaacatctctaccatatttgacattgattctgatgcttgctctgtcttatcaagctatgtttttgtcttttagtgtgacttctaattttttgttgaaagccaggcatgatgtactgagtgaaagaaactcaatacattgtaatgtgacgataagagttcaggggaagtgaagcattctatagtcctatagcaggtctcggccttttagtgagcctgtgcctatgaacggtgactttcaacaagtgcttttcattccactcttttcctgtccttaagtgggacaagatcactgggggggggctagaattgggtatttcccttctccaatgtagaagctaaagagagggctggagttgggtatttttcttcccctgtatggaaagctagaggcagttaaatttggatattttccttcttctaattcagttaggctgcgacaaaaatcccgacagtttaggctctaatattataaaataatttctcttgagtataggccttattaagaacactatactctgatggagctgagggggagttttctctgatattcactgcgagaacctcgtagagctccaggaagcaaaactcacaaaagtgtgggagtcttccagaatttttcctttgcagacttatctgcactgaacctccagaaattcatcaattacagttcaggttttcctacccaggtactggttttcatggaggtttctgcctgtgcatttctgctccagtaagttgttcttcttgtatggtctgtctttcaaattttttaagtagggttatgacctgtcgcctcacttctctgacagttctgagagtgttgatttttcagtttgcttagatttttacttgtttttaggatgaagtgacaatttccaagctcctccctgacatgccagatcagaaactgaaagtcctaagcctcatattctgtgcgtgggtatgttcacatcctgcctgctccagtgcccccacctcacactctctttcccttccttgtccccttgtgagatttctaggtccaatacaaagactgtgttcaactcattcaactactttggctcatctgagtattataatgaacaatcacaaaaaaaaatgaagtaaaagaaaaatccatcaaagaattgagatatttgagaaaaagaaaggagatcagtgttttataaaacttagaaatagattttttaagtgtttcttcattgacttatgtgaaaggacttttcttaatttaacaaattatgtgctttcgtttatagcctcaaaacttcttgtgtagctaagaatgggtaaataatcaggctttactaaaggactaacgtaaagatcttctgtaagtaacatttctgctactcaaggaagagataaacttcatggcataaccttgccaaagtatactaagaataaccctgacacaaagctcttttttcagccaacatgccatgaaagaaagaagacaaggggtgatctccactctctaagtgaaccactaaacccaccaaagaagaaacgagggaaatagaaagaggacccttgcctgagataatggatctgtatgtatgagtagtagaaccctgctcaaagtacaaggaagggaaaaaaaagttagtttatttggaattttggacattaagagtctttattgttcattttcttttaactcacatgaatggcttatcacttcaattaataaatatttcatttcttttcaacatattcatgaaacaaatctgaaatgaacagtgcaacatgtgaatgtttagaacattataaaattaaacacaaaatctgtctggcaatcttcctagcatcttaggaaaaaagttgacaaaatttcaagcagcagaagggggcagtaaaactcaacagaaagctctggaagatttttaagattcttccttattttcttttcatgtagattatttcccaacaaatttcagacgctaatagaaattttgtacaacagatccatatatttgcctaaaatagacacagaaacattgaatatatgcaaacatgagagctataagttttacatgatcaaaccttttttttatggtacacaatagtcacagtacttttccatataaaacaggtttagtggtcttaatttagtttggcacatttaatacactcccatgaccagcatcccaaatgtacctatccgttttattttattgtctcagaattgtcagttatttaataaattatgtaacttttttccttatgctcagatttgcacttctttctaaaactctgcccatccttaaagtcccagattctccttgaacttttttttttgactttccaagtacatggaactcttcactctatcctgctatataagtgacagaatttccactatgggatagatggagttcaattcctttgagtttaaaataatctaaatataattattccttatgccctgtttttccctcacttttgtatccaaatctcttttcagacaacagaacaattaatgtctgataaggaagacaatgatgatgatcacttcaaaatgaattcaggattgtaatgtaaaattttagtactctctcacagtatggattctaacatggcttctaacccaaactaacattagtagctctaactataaacttcaaatttcagtagatgcaacctactcctttaaaatgaaacagaagattgaaattattaaattatcaaaaagaaaatgatccacgctcttagttgaaatttcatgtaagattccatgcaataaataggagtgccataaatggaatgatgaaatatgactagaggaggagaaaggcttcctagatgagatggaattttagtcatccgtgtctcatgaagaatcagatgtgtacactaagcaaaacagttaaaaaaaaaacctccaagtgagtctcttatttatttttttcttataagacttctacaaattgaggtacctggtgtagttttatttcaggttttatgctgtcattttcctgtaatgctaaggacttaggacataactgaattttctattttccacttcttttctggtgtgtgtgtatatatatatgtatatatacacacacacatatacatatatatattttttagtatctcaccctcacatgctcctccctgagcactacccatgatagatgttaaacaaaagcaaagatgaaattccaactgtcaaaatctcccttccatctaattaattcctcatccaactatgttccaaaacgagaatagaaaattagccccaataagcccaggcaactgaaaagtaaatgctatgttgtactttgatccatggtcacaactcataatcttggaaaagtggacagaaaagacaaaagagtgaactttaaaactcgaatttattttaccagtatctcctatgaagggctagtaaccaaaataatccacgcatcagggagagaaatgccttaaggcatacgttttggacatttagcgtccctgcaaattctggccatcgccgcttcctttgtccatcagaaggcaggaaactttatattggtgacccgtggagctcacattaactatttacagggtaactgcttaggaccagtattatgaggagaatttacctttcccgcctctctttccaagaaacaaggagggggtgaaggtacggagaacagtatttcttctgttgaaagcaacttagctacaaagataaattacagctatgtacactgaaggtagctatttcattccacaaaataagagttttttaaaaagctatgtatgtatgtgctgcatatagagcagatatacagcctattaagcgtcgtcactaaaacataaaacatgtcagcctttcttaaccttactcgccccagtctgtcccgacgtgacttcctcgaccctctaaagacgtacagaccagacacggcggcggcggcgggagaggggattccctgcgcccccggacctcagggccgctcagattcctggagaggaagccaagtgtccttctgccctcccccggtatcccatccaaggcgatcagtccagaactggctctcggaagcgctcgggcaaagactgcgaagaagaaaagacatctggcggaaacctgtgcgcctggggcggtggaactcggggaggagagggagggatcagacaggagagtggggactaccccctctgctcccaaattggggcagcttcctgggtttccgattttctcatttccgtgggtaaaaaaccctgcccccaccgggcttacgcaatttttttaaggggagaggagggaaaaatttgtggggggtacgaaaaggcggaaagaaacagtcatttcgtcacatgggcttggttttcagtcttataaaaaggaaggttctctcggttagcgaccaattgtcatacgacttgcagtgagcgtcaggagcacgtccaggaactcctcagcagcgcctccttcagctccacagccagacgccctcagacagcaaagcctacccccgcgccgcgccctgcccgccgctgcgatgctcgcccgcgccctgctgctgtgcgcggtcctggcgctcagccatacaggtgagtacctggcgccgcgcaccggggactccggttccacgcacccgggcagagtttccgctctgacctcctgggtctatcccagtactccgacttctctccgaatagagaagctacgtgacttgggaaagagcttggaccgctagagttcgaaagaactccgtggatattccagctttcccacaagcactgatcattatgagccagttacttaaccgatctgagacactctcacctcctaaatagggatagatgatactaatttgcaggttgtcattatgataagacaggatctgatcaatatatgtgaattgtttatatttggaacctttttattgagtggaagaagttgttttaaatattctagtcagttctttcctgctcccaggaaagcccggattatgttttaagataagcaaaatgtcttaaaagtaagctgttttactttgaatttttccctaaatgttgattagtgtactagatccattttaatttggaaagtgaagtgctacttatttgaacttcttaaaaatgctaattttaacatctaaagagttaactaagaaaagcttagtaacatgatgtaccaagttgaatatgctgttatccttatttagaatagaaaattggtatttctacgttttatccattctaaggcaggttaaaaaattgtatttccatgactacctatatatttcttgaatttattattgtaaagttgattcatagtcaaacaattaaatgtttaaattaagattaagacactagagaatgatttatttgctgtcctttaattgcagcaaatccttgctgt

SEQ ID NO: 37 - DNA, 6000 bp, Homo sapiens
gttttttaaaatgatgtctagctgaaccagccaatggagacaaaaatatttatatataattttcctctaagttcactagtcattttatagatcagttataactttggctactccaatgagttaatttctttctagagacattataaactccttaaagatggaaaataattgttacttttttgaataatgcctactatctaaaacaatgcacataaaagctgctcaataaacttttgttgaattgagagaaaatataaaaaattgaaagcagtctgtttgtaataagtatttgctaagtcttacagatcttctcttttttttggaattattgcaacaaatatttgacctttgatttgtaggattaaaatgtgatttctcatattttaataggagcaagcattagtcctgcaattctttttgtcaatagaataaaaatggaatgtatgcttgctgcttctacatgccggttgatacccatgctgaacacttttcttacaacacagaggtttccttgttttctgtcttgcgttctacctttgctcaccacagagacattaatgatgccatgtgtctttttgcaccatcagtgcagcagctttcattatgctccttgtctcggtcccactgtagtctaattaaataaatggaaacgggtagtcactgaaaataaacagcaactgcaaaagttttgcctcttaagaaaccttctgcattgtattccgccctgcctcattgattctaagatctctaccgcttccttgtgttcagaaaccagactcttcagtttgtcttgcttcagtcagacaaatgctttataaaaatgacctatatttttcagactgtggggagagaagaaaaagactttgagaaagtgactaaggagggagtaagagtgatacaatctttgattcaatttagttggactgtgttctttatgccttcatctttttctttataaaaaagatagcgtttttgatgctctgctccaggcagcctcccagggtgagtgcagatgtgctgagccatttggctgccttgaggaccggctcagagagcctctcttctcactaatgaagtcatctcctctcggcagcccggcctctcccatcactccatgttggaacttggctttggcttgcatagttctgtcgtgatgtagatggtctttcagttaagttctagagaaatctgctcaaccatgaacaggacatttacagcacaggagaaaaaaaaatttattaaaacaaatattttactgtaacattttgatttgggggttggagagcaaaaactcaatatctgatgtctgggaaaaatctaatgttttatggctttctaaggaaatttgtctgtgtttaatttatcagagcaatttatatacttcgggttaaagcacaatgagattgccaccatcactttgccttttgcaagatttcttttttaagaataaaaagaaggcaataaagaccttgtatttctgcctttcctagaaagccaaagagaattcaaagtgctggatgaaatgtctgtccctaatttgcagtgttttatttaaaaaaaaaattatgacacaatcttagaggataggcttcctttttccagggtctttgaaagttaaaagtacatttttaatctgtagcattactgtatcatccagtgaggataatttgcttagttgtgcctaggaccagtcagatcaaggagttgaaactaagctctttctgaatttgaatgggactggaatcttgtcatccctagagcagcaatagatgatgccatgtctaagaacacttcacctgatcaataaaaaaggagaagtctgaaatgtaatcctaaagaacctcagaaggaggtttagatgaagataataaaattccctggagacacatctgccatctacacctttcctctccaagtcattggcttgctgcccctgagctcagccaaattcccaaagacaagatcaaagcaaggaagcaaggcacatagcttctggcttatggtttcttttagacacaagcattgtgaatgaagatcttgctttatttatacctgggatcttggagttttcacaaagaatatccccagtacaaggatgtgatttaaagggggactcacagaataatattttaattactgtttgattcatacttgagtgtaatggacaaataaatacaattttagttataaaacctgaaaaatatatattttcccattcaaaaacttctgatagttttgtcaggcattggagaatcagaaataaatgctctctcattttctttctcttgatgaaggaaagtcattaaaaacagttacatagaaataataatacaactgtagactctattctaaatatagctggtatgttttcctttttcttttttatccattctccattttagacagctagaggggaaagtctgccctagagatagaaagaagatatccatggggtataatttcattttagttatctgatagcctgaagaagtatttaattttctgaataataatgttacaagtcaaagaagagaaaagacaggcagtttaaagcttttcaacattgtgcatattctaattccttaagtcagccctgagaaagtgcctttgtcctgtagaagtatttggtcaagtgttgtgaagtctattggcattaaaagaaactaaaaattttggaggattagagaatcaaatttggcaacataaatgaaaacatctcagaatgtaaaaagtatctaacccatcactttcaatcatgttccattatatacagatggcattatttatagtgaatgttaactattaacatttccctaaaaatgggcattaatctgctattagttgcttgtttctgatctagttctcctttgttgaaaggttttacttaactgtatcataaagggacaaaagggtaaaagataataagcttttcagactggcagatctgtcacttacaaaatggccttgggcaggttacttgaactctttgaaactcaactagatttactcaaatttaagaatgagaatacaaatccacatcttgaagtgtttcacagaaaggtctatcttaatgtctggagtatatatttcaatgaacattcattttattttatttctctccattcctgaatcaagcaatcttgaatctaaagttgctatgattagcactgaaaagaccactggactattaattgtgtgactttgggacagtaactttctgcaccttagtttgtttacatgttatacatgaaggttgaagtctgattctgctctgtgactatcattctaaacatctgatgaaatcaaatttcagtgtttggaatggtagtacaataaatttactaagaataaataattcactgcaaaaacacattgatttccaaatgatgtaactgacagttatattactgcagagggctgataaataacaaaagaaatgaaagatgcacatggtgagaactgaaattatcctgacaagtcttctacctgtttatcacttaaaatcaatgaccatgctgaatgcctacaaattacaaaatataaaagaaatcttataaatgcgcatgtacaggagtctaagttactaaaagttttaaagcataagtttaaaccaaactaatcaaagaagttgagaggaaaaattggctttcatctttaatcactactgttttgaggtcctatgtttaatataattttctaagtagaggcttcagagagaagagttgtgaggatactttcatatttgtgtagaaggaaaagtttgccatccattctagtatccctagtgttatactgatgtgcaccttggatttattttgttcctattgtataaactcatacttgacttcaaagaaaaggaaaatccaaagtccctcttttctaaggggacagaaatcctttgtgtcaactgtttgacccttttctctgtaaggtcctattggaaatcttttgtaacacaatgcaggggactcttccatgtgttgatgctgtttacacagtggggtgggcctgactgaagaaaaaaaatcgcatatacgcatgaaagattatggtcttatttccggaaagcatgaaaggtgattgatacttccaagaagtccctgttactcaggaaaattatcaaatattctactcagagatacttggaaagactgaaggaaaggaagaacgaagaaagcagaatctagacttatgtggggagagatttgtggcagaggaaaagtattctctttgaatccgacaagggatttgcctgggggaatttcctgtccagccttttattaccagggtcttttgaagccgggctccccattgggcagttccctgggagtgcagtggggaattcttacactttccctctaggtccccgaaggatctcgttttctcagtgtctctttcaggttggcaggagccttgagcctgacacttccctttgatgggacaggcaagctctgtgggcgcgtaaacacgctgtaaccaagttctttgctgattttacagttttgtgtgctcccgagaagaagtgatcgtactcaattgtctattgctggcctgccccctaagagcctgggggctcctttcccctaacccagaactagctgcacggggggcggggaaatgggggtggggaaggagtgggagggcagtggtttccgcgagcagagcgatgttactgagtgagtccctgaatggggagcgctgctgtccccaagccgattggtacttcttgtcaggaagaaacgccaagaggtgggagtgcctggggagggaggcaggcggtccctaccgcaggcgcggggagctgcctttccgcccctccgcctgctttccaagcctggactcttaggagtggctgaagctgcggagcgcttttggagcctgtgaatgaaccctcctcctctccctcctccttcttctcgctgagtctcctcctcggctctgacggtacagtgatataatgatgatgggtgtcacaacccgcatttgaacttgcaggcgagctgccccgagcctttctggggaagaactccaggcgtgcggacgcaacagccgagaacattaggtgttgtggacaggagctgggaccaagatcttcggccagccccgcatcctcccgcatcttccagcaccgtcccgcaccctccgcatccttccccgggccaccacgcttcctatgtgacccgcctgggcaacgccgaacccagtcgcgcagcgctgcagtgaattttccccccaaactgcaataagccgccttccaaggtaatcacgtttcttttgttccccccttaaaaaacaaaaacaaaaaacttatagaaaaaaacccgcgagcttagaaaaaagaagcaattggtagaaggctttaattaaggcaaagagctgtaaggcgaagttaagaaaatgtaggcacttaaaaaatgcaggtaactttcataagggcttttggggagaggcatacagagggaccttggtgttgaaaaagattcagacaaaagaaacccagggtggggtggggggtaaaatgactaacggaattgggggaagggagggaataaattgtaaagaaatcatagaaaagtggtgggttcttgagctggagagaagagagggacctttggcactttgatttttttgttgttgttgttcttaacacgctcgaggcaaaagtttgaatggggactaccaagacttgccacagacaagtccccgaagccgccttggtgcaggccacctggtttcccagcccctggtgtgtggtcagtgcctggtgttcctggaaagccactcccgggcagctcctgacagtgcgacccggcgcccaagcagcctgggaccttgcgcggacctgaccccttcagaccgcaggcagtctgggaggaggtccggccgggggaggtgcaggatccccgccgtgtctctttgacgacttggggactgtcacggttctctcccggcgcccctgggttcttttgtcctgcacgcggtgcgaaggggccagcaggg

SEQ ID NO: 38 - DNA, 6000 bp, Homo sapiens
accttcagaactgtaaaagttcttgttgttttaagcttttaaaaaatgagttcttatctttgagagatactttttgaaatgtccccagatgatatgatatccagtatttgcctcaaaataattttgaaaattggggagtaggtggtgatatagatgaaatgagattggctatgggttaataattggtgaagctaggaaatgaatccatggtggctcaatatactattctctttaagtttacatacgttcaaaatttcctataataaaataagaaagagagagaacaaaaaaaggagagaaagaaacccatctcttgtactgtatgtcataatctgagaaacaaatatgtgattgtatgaagagggtcagatagaaagtagctgacccacactgcagaaccattttctacacagaaataaatccaccagccacccttgaaagtgggttgaagactgtggggcctgtagacatggtatgtcatttgcatgtttgaatattcatgaactcatcaaagaggagtgtcctcagtagacctcaatgccccttagcctctgtggcctcttgacaagctctctcactcccctacacaggaaggcagctttgttgggccactctcatcctttcagacattaacctcatagatggcatggtaatggctcggagatttgagcagggtcattctccatcgcataactccggagacatatttgaacacaggaaaaaggaagattttagaagtctccaagataacaatgagcccttgagaagaaaagcagggacatggtctgagagacagggaagccagatgagaaatattttcttataagttgtagaagtatcaggccacctttcccctgctaggagtgaatctcttggcatggggcagacctggcagacagggtgggatgagactgcaagtcaccccctaccccaggatcttgagagaaatatcttctgggggctggggacagaacctcagggtctgtttcagggctctcctccaaccccattgcctttgggaagctctgccaccccaacaactggggaccctggcaagctgcttgatctgcagtgatacaggcatagtactgcccgcctcacaaggcaggcgattgaggcatcatttcatggacctatttttcttttttctttttcttttttgagatggagtttcactgtgatacccaggctggagtgcaatggcacaatctcggctcaccacaatctcagcttcccaggttcaagcaattatcctgtccagcctcccaagtagctggaactacaggtgtgtgccaccacacctgcctaatttttgtatttttagtaaagacggggtttcatcatattggccaggctggtctcaaactcctgaactcaagtgatctgcccacctcggcctcccaaagtgctgggattacaggggtgacccaccatgcccggcccatggacatatttttctgagctctggtttgttcctgtggagttgactgatcagctgaaaaatgaaaaggcatatttccttcctatcctcacaggaagggcctgcagtgtccctgagcttccctcactcaggagctcacgctggagatccttggctgtctcctctcctccccaacataaaattgttctttgtgcctgtctaactcactctatacacaggccagggtggtttcccactggtctggctcttctttgtggccttgggagcaatttgagcccccaagaattggttgtagatctctgctgctcttctttaaagctattgaataaagcgaaccccattagaggtgcctgagtatactgacatctctttctctcagtcatttacaagttggccgttgctttggcactctggcactccattgctcacctgtctccttggtcacctggactatccttcctcctcctcatctctctgatcctggctgtcctcaagctccagctagagcctcaccccgtccagggagccctcactgattgcaagcccacacagacaccctccttcttctttacatactgtgttcagttactctttctttgcttcacacattccaaggaagattaacccagacagaaaggagctccaaaaaatactttttgtttccaaatcgagaaccaaatggattaaatcaagcacaacagcatgggctgaggaaggataactttgatggtagctgatgcttctgaagagcatttcccatttcaactcattagactgatcttaaagccccagaagaggggcacaaaccagcacccaggctctcccttgtcttttccctcccttctagggcccctctggctcaaacagcagtggatctggaacagtactcagtgccacgccctgtagattcctcatcctttgcttctcagcaccctgagaggtagtcagagtgtccccatttcacagatgtggtgactaagccacaaagagatcaagtatcttaccccaaatcactctggtagacagtgacccagctagcaagaacaggcattctgcctctaaagcctacacatgcagcctaccctttgctgcaagaaatagcacagccaccaggggctgtgcctgggaggagacccagaagggcaggagcgtactgacccatttggaagactagacaaagaggtggacagacagaaactgagtgaaactagctgaattaagtgctatatgttcagctgaccaggtcagaaaagtgagatcaggtgagcagaagttatccaacgtggtcagaagagggaggagtggcaagcttgtggttctttgggatggacaagaaggactggagaggtgggcaggcctctgcctcgagcacgaaagggccattccaagcatggcagggagtcagaacagactggcctctgctgtgtgccaggcactgtgctgagcatttggcataaaccatctcaggtgattcagcataaagggagaagtttggggaggatgagaaatccggctagctgggctggaggcatcagagagcagggagaagagtttagactagttggaagtgaccaaggaatggccagttcactgcttaagcctttgaccaatgctccattctggtaagtcaggataacaagaaagcccaaagcatggctggccctggtgggatgccttacagaacctgggccaggccccatccatccttgcgaggtgtcttattgcaccttcaggttggaaggactgggataggttgccctgagtgcccagccaagatgagccctgggctggctagggagggacacagagccagtgcttgtgtgaacaactgatgacctaaccatccagagccagacaaagaagcagtgggaaacaagggcctagagctggctctcaaccagggctggtttacccagcacccacaccccagtgcctttgacaatgtctggcgacatctttgtgtctgggtgccactgggatctaatgggtagaggccagggatgccactaaatatcctacagtacacaggacaggctcctgtaacaaagacttatgtggcctagaatgtcagtagcacagagattaagaaacaaatcctagtctagggaaagagggtgagaagcgctgaaatccaagttgctgcctgggaggaagctgtctctaccctgaggaagaggctccttttcctaattcagcctgcactgtgagaacacatgtgagccccagggaggcaccctggggaaggtggtgctagaggggaagaaaatgttatctgctgtcacttaggctgtgatttgtgcaaaaagcgatttaaaagaggtagtcaaaaagagggtcaaaaagtcagcccatgtgattatgtcatctacttggtggcaaatgcagttaaaccacaatgacatacccacgcaggtgacaaaggagatgtgatcaaagattttcattgcagtactgcttttaatagtgaaagatcagaaacaatatagtttgtccatcaggggacaagctggataagcaatggaatactccgtaaaataatggggatactttctatgtacagctatggaaaagtctccagaatatattaagtgaataaagcaaagtccagaacaccgtggagtacagtgctgccattaggtgaaacgggaggaaacattaataaacagtatattgcttacatttgcataaagcagcagtggatctcaaagttgattgtgcatcagaatcacccagaaggcttttttagccacatgcacttcaaataacatcaactattttacttatttatttatttatttattgagccagagtctcactctgtcgcccaggctggagtgtagtggcacgatctcggctcactacaacctcctcctcccgggttcaagctattctcctgcctcagcctcccgagtagttgggactacaggcgcccgcgaccacgcccggctaattttttgtatttttagtagagacgaggttttaccgtgttgcccaggctggtgtcgaattcctgacctcaggtgatccgcccgcctcggcctcccaaagtgctgggattacaggcgtgagccgccgtgcccggcatcctttcttttattttcgggagagacgtggaaagtgccccaattttctcgcccgtagttgaacctcccagctttcctgaccccagccaccaccggcgcgaggctttagacaaaggcctgtaagtggcctctttccttaatcacgccagcacaaaccccaggagattgtttcccaactcccgagtggctgctgagtgtgagaagttaatggcgtttgaaggaaatccccagcagccgaagagttcggccaacaaagcaaacgtcccgtctccggtctcctcttcctttgtaggggaaacgaactgaacgtctgaaacgaaggtggcgcggcctggacaaacctgacccttcgacatcccccgcccctgcgcccgccctcgctaagcggggaggagcgaccgctacaatggatcctcccgcaggctttgtgcgcgctgggaatccagctgtcgccgccccgcagagccccctgtccccggagggcgctcatttccgggccgcccaccacccgcgtagcaccggcagccgctgtcccggcagtctccagccgtcccgcccgcttgtggccaactggctccagtcactccccgaaatgccagtcgacttcactgggtactggaagatgttggtcaacgagaatttcgaggagtacctgcgcgccctcggtaagcgctgcccgctgcgccctgggcgccccgccgagcagctccgggccgctccctagagccctcccgagacgctgcctgcctgcctccatcccggcgagccgcggtccggtgcccccggacgccagaaagggcgtcctcggccaccgctcccagggcagcccccaggctgcagattggagaattcggggttgttaggttaaccggtggcaaatgtctgctcgttggccctggaggtgggtaatttcattagtaaatctggggcttggtttgctactttttgtttttaaacggttaacataagagcagaaaactttgttgggggcggcaggggaggcacaggcaggctgtgcgcagagacaacgcaaagccagcgggaaccctaacagtgttcgcgggcggagagggctcctggggccccgctaccttgggaacggttctctgagtttccctgccaactctctggcgctctctctctccccgttcaacccccaccgcagacgtcaatgtggccttgcgcaaaatcgccaacttgctgaagccagacaaagagatcgtgcaggacggtgaccatatgatcatccgcacgctgagcacttttaggaactacatcatggacttccaggttgggaaggagtttgaggaggatctgacaggcatagatgaccgcaagtgcatggtgaggattcgcgtccacctggtgtctcctgcccagggggcctgaccaagggctgggctagttcatccgagagggggcaagggcctgagggactgaaaactcttcccactctcagcccccatggtgggcagc

SEQ ID NO: 39 - DNA, 6000 bp, Homo sapiens
cgcgcccagccaaccccacttcttaacaccatcaccttgcaggagacagggttttgttttgtttttttttttttttttgagacagagtctcgctttgtcacccaggctggagtgcaatggagtgatctcggctcaccggaaactttgcctcccaggttcaagcgattctcctgccttagcctcccgagtagctgggattacaggcatgtgccaccacgcccggctaattttgcatttttagtagagacagggtttccccattttggtctggctggtctggaactcccaacctcaggtgatccactcacctcggcctcccaaagtgctgggattacaggcgtgagccatgtgcctggcctaggggccagggtttcaacacacaaattttggggaggacacattcagtccctagcagaaccctggttccttttagggaagatgggctttgggaccagaatctgagctctggtctgcacactgctcccgaggtctcgctgcccccgaggtcccgccgcccccgaggtcccgccgcccccgaggtctcgccgcccccgaggtcacgccgcccccgatgtctcgccgcccccgaggtctcaccgctcccgaggtctcactgcttctaggctctctccatgcacagagcagataaatctctgcacaagtttgcaccaataccccaatgcccccagccctccggccccccaaacaggtgtgtgtctcccttcagaacagagctgctcaaatgtcactggggtgtggccctgtgcaggcggaggcaggaggatcactggagcccaggaggtggaggctgcagtgagctatgactgcgccattgcactccagcctgggtgacagagtgaaaccctgtctcaaaaaaaaaaaaaaaaaaaaaaaaaaagagccccttggaaggggcctacagggaggggtgttggggagggagagagttctaacccaccagtcagtcagtcccagagcagcagcctcgggacctcagcttgggcccctctaacgctggctctatgaatcaggagcaggggctgcaggggacgggaggtttagggataaccccgtggcctcggggaccagggtctagttaaggttagtggctgtgatactgttcttacttcaaaacattatgaaattgtggtagaaaatgtggtattacaaaaatgtggtagaaaatgcaaacagtgtggacagacaggaagcaaaactgaaagcctgtttctgcctgtcaggggtcatcccacagacagctccttgcgtcttttttcagctctgttcaagtagagactcagaatgacagatcctaatgctgattttcttccatttcctggcttctccctgctttacttattagcttgctggcgctgccatgcaaaggaccacaaagtgaggggtttaaaacaacagaaactgactttgggaggccgaggtgggcggatcacttgaggtcaggagtttgagaccagcctgaccaacatggtgaaaccccgtctctactaaaaatacaaaaattagccaggcgtggtggtgggcgcctgtaatcccagctactcgggaggctggggcaggagaatcgcttcagccggtgaggcgcgggttgcaatgagccgagattgagccattgcactccagcctgggtgacagtgagactccatcttaaaacaacaacaccgcggggcgcgggagctcacgcctgtaatcccagcactttgggaggccgaggcgagcggatcacgaggtcaggagatcgagaccatcctggctaacgcagtgaaaccccgtctctactaaaaatacaaaaattagccaggtgtggtagcgggcgcctgtagtcccagctacttgggaggctgagacaggagaatggcgtgaacctggggaggcagaacttgcagtgagccgagattgtgccactgcactccagcctgggcgacagagcaagactgcatctcattaaaaaaaaaaaacaaaaaaaacagaagctcactgcctagcagtctggaggtcagacatagcacctaggcttgggcagggctgcttcctcccaagggccttggagagcatccgcttggctcccaggcttacagatgtgccaccctgatttctgcctgcggccctccctgtgcatctgtgtccaaactcgcctttctatactgacatcagtcatattggatcagggcacatcctactcaccacattttaacttgataacttctataaagaccctatttcagccgggtgcggtggctcacacctgtattcccagcattttgggaggccaaggtgggtagatcttctgaggtcaggagttcgagaccagcctgatcaacatggtgaaaccctgtctctactacaaatacaaggaaaaaaaaaaaaagctcagcgtggtgacgtgtacctgtaatcccagctactccagaggctgagaaagtagaattgcttgaacccaggaggcagaagttgcagtgagccgagattgcaccactgcattccagcctgggcaacagagcaagactctgtctcaaaaaaaatgttaaaaagcccctgtttccacataaggtcacattctttattttttttccaagatggagtcttgctctgttgcccaggctggaatgcagtggcactatctctgctcactgcaactctgtctcccgggttcaagcacttctcctgcctcagcttcccgagtagctgggattacaggtgcctgccactatgcctggctaatttttgtatttttagtagagacggggtttcaccatgttggtcaggctggtctcaaactcctgacctcaggtgatccacccccctcggcctcccagactgctgggattacaggcatgagtcaccgtgcccggcccatataaggtcacattctgaggcactaggggttaggactccagcctaagaatttaaatttaaggggacacaagccacgccatttacctaatctcaggccctccctgcagtgggcatgcatggagtcaccttttccgtccttctccctggacacaactggagtctcccatagacagggtggtggccgtgccacggagccacgccacgccacgccacgccacgcagtggggcagccagcactcacttgcccttcacagggaaaccggccgggtgtggcagctcgcgcctgtagttccagcactgtgggagaccaaggcaggtgggtcacttgagcccatgaggtggagaccagcctgggcaacatggcaggaccctgtttctagtaaataaatgaattgattaaaccataaaaaaaaaaggaagccaccgggctgattcccaggtggcgagggcacaggggggtgttggatggccactgccgctccacagtccacagcccacgcccacagaacgcagtggggccgctgcagcggtgaaccgagtcttgttggtttgtttcttgagacgggcgtgaggtgaatggtcttcctgtgtcttgttttctttttccttctgagccaccggttcacggcctctgtccgtgccgtcatttttcctgtgggtttgtgagggtgcgtctgtcggtgttaaagacacaggatgccggggcagcagagggggctgggggcctggggcttctctgtggttggccatttgcctgccagggatgtgggaaaccagcaagcggagctataaccacagtgtccagaaagagctgaaatactagggcttggaatcgaggtggaggccggatggagggaaattgaggttcaggacaccaaaggatggggcagccacatggtatttccaaggctctgtgtccaggagccccgactggcgtggtatccagagaagcatcaggctgggctgactggggcagcactggagtgtgttccaccggggacggatgaggggcccgtaccaaggccctggggagaaggtgagcaggagagcagtgccacctcagctgccctgtccaggctggtgaggcaccacaccgcctgggggaggtgtggccaggccaatcctgtgggcaccccaggtctctgggtggaatctcccctcggtgtacctccctggggctgcaccctaaagcgtcagggccaggtgggaggaaggcacagttggcgaccccaaagggccagactgaactgtgggttccaatcacgccaggaggctcagcgcaggctcacacctgtggaccaccaccctcccctggcctctttcttccagccacgcaggctgtggcttctaacccctctcctgctgcttctttttaaaggttaaggggttgggggtaagaaacctgcgctgagcgccagtgggagggatgggaggtggggtggagacctgcactgccggccaaacaccaaagccaggctggcctccccgccctgttgcgggcaggtctggaatttgagccctgccctgagcggggagggccctgcctgactgctccgtagctgggaaggggcggctcccccaggtgggcttatcaccctcccgatgccctggtgctgcagatggggaactgaagccaggctgggcaggccatttctcctgctcacccacacccactggctttctgggctgggagccctgacaaggggtatttgcggaagggagagccatagggcagggtctgagctgggttcacggtggaggtggtcctgacccagagccgcccccttcccaggtgacaccccctgcacccttctggcctgtaggctctccctatgccctgccccctggtctccacccaccacgctggctcccagcacactcagtaccgggtgggcggatctccgtgcacaccagactcaagtccagggcagccccccacaccattccgccaccctgaggtcacaccctcaggctcagacaccccggggccgggctggcgttgctcaggcagctggttctgcgcgctgggcagcttcatctgcccgcctaggtggctccacggggcgggcccctcggccagggagggcggggcgcacagggagacttaaagagctccccaggtccccacccgcgcctgaccgcggcagctcccaccatggcggagaccaagctccagctgtttgtcaaggtgcagggcggactcagctgcggggagggtgtctgggaggaagcgcttttctgggctttgctttctgtggcaggctgtggggtgggcctcccagtaatgtctgagccccttcctgtgggtggctagggggactcaggcagccctacagaggctgagtaaagtgggacccagcgagtcacccagagaggggtcagtggccctggtcctgctcccagccttggctcctgggcccagcccagtcttctggaggagagctccttggtggggaggtaccaagcaggctgccaacagtggagcttacggtcggtgttccaggatggggggtgctgggccaggcagccccatcagctctcaggtcggggactggggtgggggactgatgtgctgttggccacagtgcccagtctcatgtgtgaatcactcagaaaacagcttgtgaggcccaccccacccctgcaaccagcttttggggactgagcccaggggcctggcctctgtccaggctctgacaagattccaggggccaagcctgccccaggcctcaaggctcccagcagctctgcccccctccccacgttctggggaccaagtcaagggccctcactgggcacttggaagtcgcgccgaccaagctggagccctggcgtccctccaatcccactggcagtgggaggcgggtcccgcccagcctggcggcaggatgcctgggtctgcttccagccctgaccccccacccccgctccacccacccaggcgagtgaggacggggagagcgtgggtcactgcccctcctgccagcggctcttcatggtcctgctcctcaagggcgtacctttcaccctcaccacggtggacacgcgcaggtgaggccccatcctgtggacccccgcctggcctcgcacactggtgggccggcctcctcccaccccgctgctgcc

SEQ ID NO: 40 - DNA, 6000 bp, Homo sapiens
aggtcatatgctcaagccgtggcagaggatggaaggagaaaatccagcccatttagcttctctcatggcaggctaggtcttgcctccaaataatattatgcaatggaggattcttactaatagaaaaggagttcagctgctgggcagcctttcaaaactgacaacacctgggctgggtgtggtggctaacccctgtaatcccatcgctttgtgaggtggaggcttgtggatcgcctgagcccaggagttcgagaccagcctgagcaacatggggtaactccatctccacaaaaaaatacaaaaattagccaggcatagtggcacctgcctgtagtcccggcttacttgggaagctgaggttcactggaccccaggaggtggaggttgcagtgagccaagatcgccccactgcactccagtctgggggacagattgggaccctgccacaaaaaaaaagaaaaaaaaaaacactcccagcattcgttaaccaaactttgatttgctcatctgtgaaatgggcatctgactgcctagtaccttcctcataggtttgctgtgagaatttgacagcgtatgcatgttgcagttagcatgatgtctcacataggctgagcattggataaatttcagctattcttactaattcttgtgactctcagcaagccacatagaatctctgtgcccacattctcactcactgaaggaagattacatcaaccatactaaattagtcagcataggctaactgctgaaacaagggacccctcaaatctcagtgcattatttctcattcacttcattgtccagtgagggttgctgggattggaatgaggtccatacaggcactcagaggccaagtcaccttctatctagtggctctgccatatacccgggacctgtattatgttggcagaggacgaacaatagcacaaaggactgggttttatagggacccagcctggaagtggcatatatcaattctacctctattccattggccagaattcagtcacatgagctgcacctaaccacaagaagtcagtttgggaaataatacgcagctatgtgttccagaggaaatggaaacaagatttggtgcaacacagcagactctgtcacacctacctaacctcctcagagggttgctaataaaagcgcatgtgaacgccaagtgtgaaactgctatggaaagtgataaactaacatgagctacaggtgatgctgctgctattgattaagccagggagtttctgtgcatcctccacattgctaaaacatacagcaatttgggtatgagaagaaaccgaaatataatcagaaggtccttcctcctgtaggggagactctttaactagtaaggctttatttctccacttgtatcttcaaaaatgggccactctgggagcggtgactcacgcctgtaatcccagcactttgggaagccgaagggggtggatcacaaggtcaggagttcgagaccagcctggccaatatggtgaaaccccatctctactaaaaatacaaaattagccaggcaaggtggcacatgcctgtaatctcagctactagggaggctgagacaggagaattgcttgaatccaggaggcggaggttgcagtgagccaagttgcaccactgcactccagcctgggcgacagagcgagaatctgtctcaaaaaaaaaaaaaaaaaaggccactgcaggtaaataatctcctttctttgcccattggtccaatccacatgggcgtgtggtgaaactggagggaaaaaaagggagcgagcagaataaaagagcagaaagctattactttgaggagtgtaattgtcagagcaggctgtcagagcagcctgaagcaatcactcagtaggggccagcctccacagcagtaatttatcaccacatgaagatgttggggagttaatcacagcactgacatgtgtcagctccaggcattgggctcagcataaacttcatgcttagaaaatgaaaataattaagagggcacacatttgaaatgtaccactaaaaagggaaggcagtcatcttagggtcaggtgaatgccatgtttgtaatccactaaaccaactggaagagcctgtggagggcaaatgtgtccaagggtactttgctatttgtacctgatagatgcctttcacactgttttgagtctctgcatggcctgtcatgaaagagaaaagcaaacacaatttgcacaggctttgctacatgaatattagtgcttcaggaatgctctaagatcctgccagctgcggctcaggaaggggtccaggccagatctgactcatcctgctgccttcctcctggaaatgatcccctttctcaccccactcctgctggctgagcccaggtcctgtctgtcccatatttcctttgatccaaggaaaactaaaagtggttactagctcccaagcggcctttgtttataaatgggttcccaccttaatatgtttactcaaaaaactcgtcaaataattagctataacagagcaatcaaactgatcaaacagttcttggagtagttcaaaccttcagagagttatttaatgacagttttaaataactgaactggggtcttccagcatagagaagtagggattgtggcagaaactgcgagggagaatttttaaagtgcttagaataaaaatcttttcattgaaaaaaaatgacaagaattgcccacataattatggcaatttttcctttccttttgcaatgcaaattcctggcagagtgtaagagaaactgagctccactgtcccagtttttcaaactaagaaaataaaataatttgctacctaaactttcaacttctacttttgaaagctaaatttaagttttaagaatcgtacaacaaaagagactacagataaacctcattacaattttttagtattgagcattaggttatttattttccttcttcctaaagctactgtagaaagaaaattcaaaggactagtaagaaaaatagctcaattgataacaagtctggtttgtcaatgacatgctaatacctgtaacagttactaattatctcagcagtgtgtctcagtttttatatttaatatattcttcatcattcttaaattaataaatagcaaccaattgttttctcttttacaagcttcatatggaaagaaaattgaaaaaaaaaatttgtattagcagaaagtgaatataagggacttcccaacctcccctccatatatttactgacaagcaactgacatgagtgatagcaaagcaatgtggttagtgaggaatggcgcagagtgtgcagtttccttttttctaatgttgatttgttttctgtgctgacacaatcctagaggttactgttcaaaggaagcatcgacaacagaagtgattagagtactgattaaaagaagatttttaagaaaatgaccaatcaccatcaatcttaatattggctaacaaatgtgtatttttctttctcatattattaagtaaatagtataaacagaataattctttattagtatatccatatagtgccttttgcaagtaaatatgattctggatattttatgacctgtaattacttgaaatcggaaagcccttttagtttctcttattacccatgtgttgctgagactaactgaagaaccagttaggaggtttgttcgttcacgaaataacatttaagaaatgggtacctgcttatcacataaaagaatccagttatttacttaccctgtgaggagacataatatgttagaatgcttgtacactgcagatgggaagaggtttttccaggaatttaaattgtgcaataaggccacacaatcttacttaaaaaaaatggtgaaggggttttaattacaccatgaagttttacaattttttaggtttttagttctggttttagaaaacagagtagaaggattacagagaaaaacttcaccattagacaagaagtcaaaatgattctaagggccgcgcaaacaggcttttccaagaattaatcatgaggtggtgcttggagaattcctttactccagtgactttgaaacccccttctcactctccactagtctttcaaaggattcatggtgaattgggtctaacgagtataacacggccggccgaaggcatgaagctcacgctaccctttcagggcggagaagttcccaggaggaagaatggagaaaaagatcgcagttaggcagtcctcccaacctcaccaaggctccacctctctccaaagccgcaaggctctgccacctgcgccgggagaggctgcaatcactgtctcctcctctttctttctcttttttttttttcttttttgcctggggtgcccgaccaagcgcagcccgcagtctgggcactgccaactgactccaactccttttatggtgagaggatggattcttcgttatttccccgcccaatctggtacccacccacccacccacctaccacgtccgctgggcgcacccaagtctaaccccggggcgcacgcgctagcgcagacaccgtatttcttctcctttctcggccaaccctaggtagaatcctaaaacaactgccctctcttccacgatctagatgttgcggcccgcggacaggaggttcaagaaatagtacactccgagcggcaggcagcgaggcggaaacggtcgccggtttcagtggtggccccactggaagccgagttcaggagcggctaagcggtcgccggggaaagcaccggggcttcccagggtcccctccgagttcccactccgcacctccgagggcgtgaaaaccacgggagccgccccaccccgcgcgcccagccccgccccagcccagacaccgccccccgccagtcttccctgcggcgcccagggaggacgcgctccgcccccttccaatccggccaatgggcgcccgggcagcgcgcggtttgcctccgcctccgccagggaaacttggaggaggagaaaagtttgtacagagggtggaaaggcgagagcggagctccaagcccggcagcccgagaggaagatgaacagccccaggccagagcctctggcagagtggaccccgagccgcccccaggtagccaggagcggcctcagcggcagccgcaaactccagtagccgcccgtgctgcccgtggctggggcggagggcagccagagctggggaccaaggctccgcgccacctgcgcgcacagcctcacacctgaacgctgtcctcccgcagacgagaccggcgggcactgcaaagctgggactcgtctttgaaggaaaaaaaatagcgagtaagaaatccagcaccattcttcactgacccatcccgctgcacctcttgtttcccaagtttttgaaagctggcaactctgacctcggtgtccaaaaatcgacagccactgagaccggctttgagaagccgaagatttggcagtttccagactgagcaggacaaggtgaaagcaggttggaggcgggtccaggacatctgagggctgaccctgggggctcgtgaggctgccaccgctgctgccgctacaggtgagatggcgttgggctgacgttggggtcaacgggtagagaacgcagggatgcggccctcgccgaagagagccaagaagggaagagcgcgctctccaaattgcttttgtaacttgttttcagtgagcattttattgattcagaatctatcgagaatagcactagcgagctacttttcccttgagatgggtcttattcatcttggcaatggagtgagttggattgtggggaggaagaggaatgggaaaatcagtttataaatattaatgtcagcaagagtgtgctgttggcaggacgtatcgcgagcctggagattttggtggccgcagttggtaagtggctacaatccagaaagtaggatcgagttgctccccttgtcttatcagtgtatcgtttctcgggcgcgggtctaacaccttacaagtggtaatttccgctcacggcagctttgt

SEQ ID NO: 41 - DNA, 6000 bp, Homo sapiens
actgccctctgcacatgtgttaagaaggtacacagagcatgtgctgagatggtgcacacagcgggtctcagggagagagtgcccttatctggcatctgcccagccccaaagactcggttttccataattgggatggccacttgaatagaggaaggtagaaggaagattgcaggagagtctgaaagagcttcctgcctggatgcctcatcactgtcctctggatccaatgtcctgctggttaatggtggcagtgctagcactgtgaatgggaggcggggaggaactctggattcttcttattcccctggttggccctttctggagctgctgtgagtaccaccccaggggggcaccattcatgctgtgtctgtttccactaggagagtttcctcatggcagtctagtttccactcttcctccctttctctaacgggtgccacacctactttggaacaatctgaacagccataaatagggactccagattcaggaatgcagagcttcatgtagcaagcatccaaggttccatcctatccggccaagaagcagctaatcactggcctgcagggctgtcctgtctgcactcgggtggtgtgtgcaccaaggaactgctgggcagattccacttgcaaggagggagggctccagtgcctggataccaagatctgggctctatatgcccttgccatctgaccctgactagaaggagctagaagtgcactgtgctggaccaagggaggccagtggctccagctgagaggttgacagcaagaagcccaccaggctggcagcacagcaggaagagctggcttacacaggccagccctataggtggcccagttatcacctcccagatgctagtcactgagctctcaggaggcagcggacacagtggttcagagcttgggttttggggtcagttggcctgggttcaaatcccatgactgttctttttttttttttttttttgagacggagtctcgctctgttgcccaagctggggtgcagtggcgtgatctcggctcactgcaagctccgcctcctgggttcacgccattctcctgcctcagcctcccgagtagctgggactacaggcgcccgccaccatgcccggctaatttttttgtatttttagcagagacggggtttcattgtgttagccaggatggtctcgatctcctgaccttgtgaaccaccagcctcggcctcccaaagtgttgggattacaggcgtgagccaccgcacccagtgactgttctttctgttggcaagattatttttttccccactaagagccttagtcttcttatctgtagagtgggtttacttccctgggtgatgataaggattagtgagatagagtttgtatgcactccttgcatggcagtattaaagaattaacgattgcctgactttctaatatctgttcccagtggcctgacccctaagctcttgctttgccttccctttttatctttattccttttccctagaccagccatccaaaggggtatggaatcttccagtgacaacatccctcgatcccagggtcacctcaaatggttaattcagtgggcgatgtttttaatgaagggcatagggtgtcgtctgcattgtaccatccaaaggtgtgagtagggccaaatggagccttgggagactttttatcctggaaagtctatgaattcatgaaatccacattactgtcattacagggccaccacaatgggcaaaagttcctcatggggagaccgcagtgttgtgtgcagtcccaatagtgtgataccaccagggggtgctgcccagctggtctctgccccaattctcagcaaggctgaggaaggcagaagtgagagcccttggaagacaggtttgacccctaggctggtggggcgtgggcagccagcctggacctggaaggtctgcaacctggcaggctgacaatggcaatagcagggactccacatcaatcggcctctttacaatttgtcgcctgttcccacacacaccattccatctcaagactcaagagatgatgcccagatagtgaacagaggctcagagaagtcagggagctgctcaaggtcacacacctggtacgtgacaaggtgaagatccctctgggcttgcctgttgccaactctggggccctggcatttggccagcgggagaggcagcatgttgaggagaaagagcctgtctggaagcctgtagcccggcttggagccctgctctacctccaccctgcatggctgatcattcctatccaatcccttcgcctcctcctgccccatgggatctcggtgaccttctcctctatttggggggaagttggcacggggcttaggatcagtatgagtggatcctttggtattcagccaagatgtgattttcccagacacagcttggcctctttaaggacaaaattcagtcctgctagagacttctcacacaacctcaccagccacgggcaccccagtcttcagctacacccaagtctgggatgcaagggggccttagcagctggctgacccaggatgcccaaggtcaccattccctagactctaggcatcatgccacatgctgcacatgctgcgtctttgagtccttgcagccgtgtgaggcacggtatcattactcccgttttacagaggaagctactgaagctcagagagtacctgagcagccctggagaaggagtgtcacttttcctccatctctgccactgactggctggatgcacaggaggactgggtctccagacaggagtgtaaagggcacgagggttgcttgtccttatcagaggtttcctgagcaccagcctttagagacagggaggaaggcaagagtgcgcctttgaggaacgcacaagcccaggagttccaacagggctgcagtggaggctaagttgcagcaggacttttgagcaagcatgcacacaggccagcaagagcaattggaggctatggtgagcagggaaggttcgcgggaggagggggaccggagctgttcatcgaagggtgaggaagagtgtgcgttgcaaaggggagccgtgggagacctgggagcaaaggccagaactttagggttcgaggctgagcagggaaacgacaggagaatgagggctcctctttggcagcacacacctggtctccaggacagagataaggtgcaggaatatgcaggtgtccagggaagacgatgtctccgggagcacatgctttatgatgctggcacccaccttggtggcaaaatgagattttgcatttactatattcagaaaactgcatgcctcagtgtgtgtgtgtgtgtgtgtctatgtttgaagtcttatgtcaaagtcctttgacatccatctctttgtcctttcccagctaccctgagaaggttggctggaaatatcctcaaagacagaaaagagtgacggtgggaggaaacgtcttgctcgtggtcatggggttccgtcgttgacaaaccaaggctcaaccggggctgctggctggagctccatgctcctgcccccaaagctatgcccagatccccatcccacctcccagcaccctgcgtgccatctgcctcctccacccctaggcattctcccatggaggagagaagcactccactctgtgtgagcccttgtgttttcatcagagttcaaggccagggtcaagggtccatcttctcccaaaccaccttgctggcttttagtgtccaccttccttaaggagtaacagtcacagagaagggaccagcaaggagtgaagccctgttctgagcctcggaagggagcggctgggaagcagtcctctggcaaggacatctgagggcctactagtttgaccccttctttccagaatctccagtggaatggcactgatgactgagggtctggggggtctacctctgccccttgccaataaccgtgggcacctgcaaagctctcacctggtgccaggcactgctctgagtgccttgcgcatacacgcttttcacaccgcctggggaggaaggtacgattatgaccctcgttttacaggtgaggaaagggaggcacagagaggttaagtgactttcccaaggtcattcagtgagtggcagagctggggtttgagcccaggaaatctgcctcaagtagctgttttgcctcaataaataatactaacaacaaccacagctaccatttgacgacccgttcctatgtgcctagtgctttaattcctcagagcaatgctgtgacttaggcgttgttctccgaatttctcatttcacagatgagtaaatcccggtttagcagggcgcctggagtgaggtgactgcggaggctcgcagacgttaggtctgcctaaatccgaagcttccaccctcctctgcctctgtgacttgctgcgtgactttggagctttcggaaactcagtttccctgtcttaagccctctgctcctcttgctttcccgctccagcaagtgagagtggactgggttgccgtgccgggcgggtgtgggtcgccgggcaactccggagtctccccttccccatcggcccccagcagaagtcccagctcccggcgttttctgtctcgtggcgagttggggcggagggagcggcgggaaggtgccgggtgggcaaggtcggagctgcgtcaccgagaggccggcaaggccagggagaaaaggccccgctgtgatttggggaagggccgggggcccataagtcacgtgctcggggcggttgtgcaggagcggactgtcctctgggaacatagaagcgcccccgactagagtaggggcggggagggagcgccggaggaggcaggttctgggccaaggggatgggggtgggggggaggtagggagcccgcggacaaaggaggcggccggcggcccagctgttttgaaaaatgcttcctgtttctttaaaggcgctcgcggctcgggcggcccgggctggggaggcggtggcggcgggagctgcctcctctccgggcggcggcgctgactgatctcgcgaactgggcttctgtgtaaactgaggctaaacaaacacagatggagcgcagcgggcgttctccagaaatgctggcaaggaggcagcgacttcagatgacactctgagcgctccgggaacggacagcccggcggcttcccgaagccggcggcgcagctgcccggggcgagggggagaaagggagagagggagggggagggcgggcgaagcgggagagccagagactcctcggcgctgagcgcggcggcggcccgggcagccccacgcccctgcctcgcgcgccgcccgcgccatgaagcacatcccggtcctcgaggacgggccgtggaagaccgtgtgcgtgaaggagctgaacggccttaagaagctcaagcggaaaggcaaggagccggcgcggcgcgcgaacggctataaaactttccgactggacttggaagcgcccgagccccgcgccgtagccaccaacgggctgcgggacaggacccatcggctgcagccggtcccggtaccggtgccggtgccagtcccagtggcgccggccgttcccccaagagggggcacggacacagccggggagcgcgggggctctcgggcgcccgaggtctccgacgcgcggaaacgctgcttcgccctaggcgcagtggggccaggactccccacgccgccgccgccgccgcctcctgcgccccagagccaggcacctgggggcccagaggcacagcctttccgggagccgggtctgcgtcctcgcatcttgctgtgcgcaccgcccgcgcgccccgcgccgtcagcacccccagcaccgccagcgcccccggagtccactgtgcgccctgcgcccccgacgcgccccggggaaagttcctactcgtcaatttcacacgtaatttacaataaccaccaggattcctccgcgtcgcctaggaaacgaccgggcgaagcgactgccgcctcctccgagatcaaagccctgcagcagacccggaggctcctggcg

SEQ ID NO: 42 - DNA, 6000 bp, Homo sapiens
actgccgtacagggaggcatgatttttccatggcccaatgctggtttatgggcttcccttcagaggccaggatggggacatcaagacccatggtttggggtctctgagactggtctcatccttggtcatagggagacagatctgggatgctgacccaggtgtccagactcaaagctccacactctgatctgcactaaccactgggcaggcagcctcaggcaagtctcctcccttttctgggcctcagtttcccctctttctaatgaggaggtcctataggttctgactgtttatgacctgggacttggccctaactttaatgtgcaggtagtgacagcttgcaatgtctgaaagggttaaactccagccccctccatatattatggtaaatggtactaaactgaccatcggttgatattgcgccaaggatccttgaaaaattattgacgtgtccagaggtagggtcctgtctgattgcatctggaggccactgagcatctgtaccatgctcagacaggggcattttggggaacattgcatccctgggtatccccaaggaactgatgagcgagccatggcagccactggcaggtgcaagtgctggtagtcccccatacgtggaatgaatcccagctgggggcccttggggaccaacaagtccagcacaaagcaggcagagaataggtaccttagagtgggctggatgaggcagggacagcagaacactggccaaggctggggccagctcaacggacccaggtggaggcagagctgggtaaacagggctcagaagggaaaatgttggctcaagtcatgctcacccaaaagaatgtcccctcctcctctccctaatgtgcccatcccaacctattcaacttgcaagactgagctgaaatccctcccccttttccaggaatatttccctgtctgcctgcatacacggcctgcccttcttggggatggctgagtctgttgtctccccttcgctaagcccttgctgaagtaccaagtcttccctcagggtgttagatgctttgggtcttcagaccatccctgccacatgggggtgtctcccactatatggatgaagaaatgggcttgcagaggcaaaatcacttgcttacacaacctgtgatgtctgatgtcaaagctgacacacctcatgcccaggccagaccacccttcctgggcacatccctgggctcccttgacatgccatcaaatgattctttgtttttgtttgtttgttttgagacaaagtcttgctctgtcacccaggctggagtgcaatggtgcgatctcggctcatggtaacctccatctcccaagttcaagcgattctcatgcctcagcctcctgagcagctgggactacaggcgccggccaccacagctggctaattttttttttttttttttgtatttttggtagagatggagtttcgttatgttggccaggctgctcttgaactcctgacctcaggtgatccacccacctcggcttcccataatgctagggattacaggcatgagccaccatgcctggccccaaatgactctatatgttaatacttcctgtgccctcccatggctaagcactgcatgaggcttggaaggggtgacaaggactagggagcctcagggctccgctcgacaagagtccagaatgggctgggcgtggtggctcatgcctgtaatcccagcactttgggaggccaaggcgggcggatcatgaagtcaggagttcaagaccatcttggccaagatggcgaaaccccgtctctactgaaaatacaaaaattagctgggtgcggtggcacgtgcctgtaatcccagttactgaggaggctgaggcaggagaatcacttgaaccagggagttggaggttgcagtgagccgagatcatgccattgcacttcagcctggcgacagagtgagacactgtctcaaaaaaaagaggccagagtgcaggtgtgtttctgaacccaaggcagaggccacagcatactactggccggggcaggaagcaggagggacaggaccaagaggaggaggcccatccagttgggggtggtagtaccccaggaaggcttcctggtataagtggtattaatgggctcataaatatcttgagttcaaatggtagaggtaaaagagggtgttccaggcaggaggaactgcaggagtaaagcccgaggcaggagttttctctgaataaggagctgtccagcctgttggtaaaaggtgagactgggcgcggggcaggctagggtgaaaatcttgccaccacaggcgtcctggatgttcctgatgggcttcctctgaaagggccacaagctgtggagtcaaggttgacaccagccccagtattctccccacagcagggaagagccaggggcctccaggacagaaaggactagggtgtgcagagatgaccttcctggctctggaagaatctaaatagaggctgtgcaaaccccgggagctggggcttgggacgggcctcgagtggcacaactgagcccatggcctgcttggcacatagtagtttctccctatggctctatcagtctcttctgacctgctgagctgacctcccatgcagaactggcacctaccaggccccctgtcagggtagcttcacctgcccctgccaccctacgtcttccagcacaggcaacttgggccaggtgggcagccccacatttaccaatgtgcctgccatggaagtccccctattccttgggaaggctcaaatttttctcccaagatcttaacgtgtggctgtagccagccaccaagagggctgaggatgttgtaagcctcaaaagttataattcgtaaacacttaccacttgtttactcttaattaccccccccctccttatttgtcttcctttaacggcctgtcaaccaaaatctcccgcctttcccttggtgccagcagcctcaattagatgcacatctgtggaggctagaactgaaatacccaactgccaaaacccacccactgtacctagactgacttcatgtgcctgacggcctgggcactttggggatagcgttgctaccctggtgttggagggcagggaggctggccctcacatttctcaggccactgcagagtctgccttgggaaggcgcccacccccgacagggcacccaagaggaatgatgtcctttatgatggtcccctggggccatgggcacaggtattatatgtccagcaaacaggtaagagaggatatcacaggccagccctaccttgggcatgaggaagacagagatgctgggaacaggtctcagcaggcagggctgggaaggcagctgttgagctcacgcttgtcgactcctgagcaggacccctgcccccctgccctcccattgtgtccagaggtggcaggggggcaactggctcagtgaggaccctgcttgtccccccaaagagctggactatcgtctcccatagtccatcaggtcccacctgtccaccaggcccctggcccctgcgttgccttcctctgatactttttttggggtctcatggtttgggatctgctggcaaacctgtctggcccctgaaggctcattcaggtcaagggaggaggacacttcaagaaatgaaggaaactgttccctgtcaagccctggtttgctgggattggagaagccaaggcaggactaggcagcaagggaaggctgtcctaggccctatttccagcccctacccctacccttttcagtccaggggctactattccctttcaactgcaagccctccttgggctgacttgtgagtgggtgataggagagccactgataccatgaggtggggcatctggacatttccgaaccatcctgcccagctggttactatccctcattcctcgtgataggccaggtctgtgggcagttattgctgagggggtcctgccctgtgtcaagttggtggggagcattctctcatcctatctgcaccagaggcagagctgggttccagggtaacttcagtagaatcctagggatggtctcccctcattgtgaatgcttcagtttaccaagagattctccccattctcacttcatcctggaaatgggagtgggcacccacacaagcattcacaagcgaggacactgaggctctgaaagggccacaagctgtggagtcaaggttgacaccagccccagtcttctgcccacagcagggaagagccaggggcctccaggacagaaaggactgggttgtgcagagatgagcttcctggctctggaagaatctaaacagaggctgtgcaaactccgggaactggggcttgggacaggcctgcacacagtgcctgttcagcccagggaagcgaagcgagtggctgcagagggctgcatcctgccgtccccagccccccacaaccgtacagccgtgcccaggtttccgcttagggaaccaggaggtccaggccctttctgccagcagccgggcgtgcaagcccccgacagagagaaatcttaaagatagctagagccacgggggctgtaagttcagcatgcctccttttctggtctccgctgaagctgtcactccaccattaaacctgtgactctaggccttaagcctgttgaaggtcgagcccccaaaagggtcacatatgctcctgccttgggccgcggggcccgggactcttcccgcgggtggggtggggaggagcggcagggtctgaggtgtgggggcgggggcgcacccggggcgctcgggtagcagctggggcgcaggacgcccgagccagtagggcaggattcgggctgcgcggggacgagaggcgcgcgggcacgggtgggcgcgtggccgcggcgggggcgcgcgggggcgggccagcccgggaagagagagggagggagggagagaagagggcggtgccggcaggttggcggcggctgctatttgagcgcaggtcccgggccgggcgctcagagcgcttggagccagcgctgcagggagatagcagcgcgcagcccgcagaggcgctgcggcccgtgcagccccggaggcccctcgcggagaaggcggcggcggaggagaggccgagttaccgcccgccgcccgcgcccccccaaccccgccgccgccgccgccgccgccactgccccccctccccgcggcgccgcatcttgaatggaaacatggcggtgccggctcggacctgcggcgcctctcggcccggcccagcgcggactgcgcgcccctggcccggctgcggcccccaccctggccccggcacccggcgcccgacgtccgggcccccgcgcccgctgtggctgctgctgccgcttctaccgctgctcgccgcccccggcgcctctgcctacagcttcccccagcagcacacgtaagtggcctcggccggccgcgagaccccggccgagccttgcgccccgctctgcccccggtccgcgctactccttccctgcgctccgcgccagggcagaggcgctgggtccggctgcccgctgcgcccgggggcgacggccccaagccccgaaggctggcagccgcggtcccggcgctctggctgcgtcgcgaaacttccccgcggtgcccctgcttcccccaaatcccccgaatgaggcaaggcaagatcttcaagccccgggaggagttgggggggggcggtccgagcttgtcagctgattcccctgccgctgacccggtgagagggaaacccgggttgggtgagaggggcggccagcgacccctgtccggcggagttggagccgcgcatctgccccacgttccctccctggtgggaatccggcgctttacagccagaggtgagggacatctccacacctgccttcaagggccttttcctttagtggggagctgtatgctgatgatgcgagcaccttcttgctgtggccagtgccacagaggcagtgtcccctgttcttggcccccctccacctgaggagagagtaccctggagagcccagttgggaggtgaaggcg

SEQ ID NO: 43 - DNA, 6000 bp, Homo sapiens
agggatctccaggctgtcatggttgctgggaaagatgagggagggaaagggggcagagtacggaggcaccaggtcagaaagacaggagagaattcagacaggaccaaaacagccagaaaaaataggataaagaaggtagaaaaaaaaaaaaaacaaaacaaaacatgagaagttaaagcctgggaaatagatacaagacaagaaagagaaatagaaaccaagaacaagattgatgaaaggaggagaagagaaagtagaaggaaaaagaataagaaagattccagacacgcattcaaataatcctaaatggggatgagcagaaagacaaggagaccaaaagaaaagggggggggggggtggtggggaggagaaagaaaggaatggaaaaagaaacaaaaggtgaatgtcctgccctgtctgtctggtccaaccaagaagctagtgtctgccctggagggaggaaaggtgggggagtccagcctgtctccaagggactgacaggcagcttctggaccagagaggaactaagctctcaaagcaagctttggggaggaggaagggatgggggtgcatggtgagtggagactcctggaggaagagcaagcctccactgggttcagcactgccagggggagagtcagggttcagggtagcatagcagtgctaatgtatgtaccccagaggggtagggggtgctagggcaatttgcaggaggaccacaaacagtaaactagagagctacttccctgggatccgtgataagaaaatcacttcctcaggtgggagaattgagcccgaaagagaatgggagcccttggggggcaggcacctggtcagtttcaaagctcgtcaatatcaaaagaggctgggatcctgagatcaaatgggctggggcactgggcagaaacgaggagccattgccaaactgccaggatgaccagaacgcccctcccccaggaaaagttcatatatgaacccacccctgtatgaaacttcttaattaggtctcatacccccggtgaatcttggatgcccttctgtcaacagaattcccaatttagtgacacctcggactgaaaagagctctgcggcaaacgggggtgaaagtttaagagggaataagcatataatactcccttgccagacctcacacatgctgaagggaatatttacagcaaactggccaaagcaaacgaccccgcctacccaccatccttttaccctcctccccgccctttttgtaaactccagataaacaccatttgatcacaaaagggtcggtttgtcccctttatagtttgaggcaggcagtgcggcagggaaaagtggcgtgggctaagcttccgtctcgggcaaggccagcttctttgctggcaccgtggcctgggctaaggacagttgatttggttttgtttcccccgacccccaccccgaccccacccccacaaaggaacattattttcagggtcctccccccacccagctttaacactcgcctacttgcacccgcactactttaaatgctgcgggcattgcagatagagaggtttttcagttaatttacttttttaattctagagctacaattaagtgaaaactctttttgcgaaaaggtggaggaatatttcagagacgccagaaattatctgggtcttttctgacccggaatctgccctctttctcccttctcctccccttaagtcacccttttctgggactctgttgaagggcaggctctttcaacgtctctagtctgtcttttgttgagtgtgagaccgaaggaaagaggatcgaggggtctgcagagagaaaaagaccgcagatagccggcagctggcgcctaatgccggggtccggggagcgctggcctcgtgggttctcctggaggccaggcccagcacaagccttcggaacacgctggccaatgtttaacccgaatgcagtggccaccaggccgcttttgtttgttcgcaaattaatcacccagcgcatggccggcgccagagtgggtttatcacccaccgggaggggggcgcgccgggcacgcagagacaaagaggagttcgcaccttcccgcttttgatcccagaattacggcggcctccctgcctaatacgagcctcctggggccgagtctgggaggtcagtcataattggcggaagtttgcagaccattagcaagatgtcgacattttcgattcgaaccccgcaaactttcctctcgttctctgcttcgcgcgctggaggttggtgtgggagaggagatgggggtcagaagtagcgatctggggtgatcacagggttaagttagagctatgggcaaaaaataggcaattgagggaggaggacagtgtgaggggcagaactccctctcagtccacccgcggagccaaaaacaaatctagacatttttaagtaaaatccgcaagctcccctcccatttccaaagctgacagctggccagaatgcagaggaatgtctctctgctgtgcgtgggacgcttgggggcaccgagtgggtgaggaggaggtcggtcacagtgtggttgtagaactactttgcttccaccccaagtagtggggcagagattggcctgcgagggcaggcaggcaaaaccagatcgctgggatttggggccgctcttgaaagagcagcgaaggggccccaggccccggaggcgagcagtctgggggagggggtgcactttttttttctatttctttcttttcttttctttttcttttttttggggcgggggtccccagagactcatgaaaccctgcagtgacttccgtgttctgtgtaaggcgggaaatggcctggcctttcgcacccttcaggtggggaggaggggatgcgggagggggtgttatgagccaacactctggggcaccaccacctcgtaattttccctctctctcctttctctattttaaccactggcagagacagagaggacgccagagaaagacagactgaaagggaaagaaaggggcgagatggcgagccagacggagttcgcagaaccacactattctctctggtgacttcagggaattctcaacgctggcgccaagctctcttaaccatgtgcgtcaaaaatgcgaggctggagaagcctgtcgcctcaaaagatcctcccctatctcagcgtggttggcccacaagagcacttcattttcacccttcccttggtgccacgttggggtttcggggttgctgggggttgcgcgggtgcacaaggcaaaatgcgagagaggcctgtgctggcctacagagacacacacatccaaagccctgagtctcttaaacccctaagcccccagatcagccctttctccgttccctttccatcgaagaagctttcatctcaggaaagataaaagaacattgttttcaagatttccctccatctaagcaaggatggtccaagacattggcccccagaatcaagaactgtgggcttaggcgaatcctctgaccccgaccgggcgctgcggtaacagagttggtaattcggcgattggtaagatccggtcgtttccctcccgtccgcctaagaggaggcccccaccctacccgtactaaaaacagtcaactcgcctctgaggtgggggcgtttcacggtttgttttacaaattcaccctccctccccgacttctggccagattaagtccccggggtggagaaagaactgaggcaccgagagataagtgcgatgcctagagaagataccaggctggcgcgcctcccccaacccaatcgcccaccccttaccctgtgctgtgcacccagccgggcctcgaggtgagggcagcggcttggaggggacaggctcagaacccagtctctcgctgtgctcgctttgtccagatcctccattctcttctctacacccacacccacatccaggtggaatatgggggcccgcatgcaaatgaaagacgagatccaaaagggctggtaaatgcatttcataaaaatcccaaatccatcttccccaggagctcaggcagggccagccgcgcaggctgtgtacgtgtttgtgtgtacgtgtttttcggtgtgtgtttcagtcccagtgtgttggcgcgtgttcgagtacagatacaccgggggtgtttgggtacccgcacatggctgcgggtggggcgcagtggagaggaagcccacacatgcgtgtgctgagatatggccgcatccttgtgctcccccagcccagacgcaggggagaccagcaccgagacacccgagctcgggagcccttcagcggcggccgggcggagcttggctccacgtggggctggagagcacgcaagcctggagtctcggcgctcgcttctcggctgccgccggcttttgtagaaccgagtggccggatggcagctcgcggggaggctcggccacccgcccggctcgcccggggcggggagaagaaggagagctggagagagaaccggccgcggcggtcggagaggcgagcggagtgcaagagaggcgagcgcccctgcccggcgcccgggcgcgctctccgccttccccgcccggctcgcctgctcgctggctccctccctctctccctcccccttcctccttggccctgcctcctccctcgatccccggctggatgactgaggcatttcagacgtgggctgaaccagagcgagcgagcgagctcaggggctgcagcgatctctcgataagccacctagaggcgactctgtgcgcgcgcgctccccagtggctcccgcccgccctctgatcatgttgacatattcacaggacaggcagtagtaccgatgcggcgctgcgacgttacagtttccgacaccttctttttataactcagctctatcccccagcactcgacctgtgaaaaccacgcctatgcagcaacacaattggtccgaaagcgtcaaagagccaatcaagaggcctccggctccccgcagcccacagcgcagcccgaccttctagagccgccgagcagacgcccggtgaattctagaggcggcggagggtggcgaggagctctcgctttctctcgctccctccctctccgactccgtctctctctctctctctctctctcccctccctctctttccctctgttccattttttccccctctaaatcctccctgccctgcgcgcctggacacagatttaggaagcgaattcgctcacgttttaggacaaggaagagagagaggcacgggagaagagcccagcaagatttggattgaaaccgagacaccctccggaggctcggagcagaggaaggaggaggagggcggcgaacggaagccagtttgcaattcaagttttgatagcgctggtagaagggggtttaaatcagatttttttttttttaaaggagagagactttttccgctctctcgctccctgttaaagccgggtctagcacagctgcagacgccaccagcgagaaagagggagaggaagacagatagggggcgggggaagaagaaaaagaaaggtaaaaagtcttctaggagaacctttcacatttgcaacaaaagacctaggggctggagagagattcctgggacgcagggctggagtgtctatttcgagctcagcggcagggctcgggcgcgagtcgagaccctgctcgctcctctcgcttctgaaaccgacgttcaggagcggctttttaaaaacgcaaggcacaaggacggtcacccgcgcgactatgtttgctgatttttcgccttgccctctttaaaagcggcctcccattctccaaaagacacttcccctcctccctttgaagtgcattagttgtgatttctgcctccttttcttttttctttcttttttgttttgctttttccccccttttgaattatgtgctgctgttaaacaacaacaaaaaaacaacaaaacacagcagctgcggacttgtccccggctggagcccagcgccccgcctggagtggatgagcctctccatgagagatccggtcattcctggg

SEQ ID NO: 44 - DNA, 6000 bp, Homo sapiens
gtttattttcttattattgtgttgaaagctctttatatacagtattctgagtacaggttctttatatgtttggatacaagtcctttttgaagaaattcacaaactgattctaaaattcatatggaaatgcaatatccccagaatagccaaaacagctttgaaaaagaacagagctggaggatcaatgcctcaacactatctgatttcaagccttattataaagctatagtaatcaagaaaatgtggtagcagccagaaacagagtgacacatacacaccatacacaattaatttttaacaaaggtgcaaaggcaattctttggaaaacaggtagacttttcgacagagtgctgaaacaattggatctacaaatgcaaaatattaatttcaacccatatcttgcaccacatacaaaaataacctcaaaatggatcatagacctacacataaaacagaaaacaaagactggagacataatttgtgggtcctaatgcaaaatgaaaatgcaggttcccttgttcaaaaattactaagaatttcaagaaggcaagagcactaacccaagcatacagctcttctgagtgcaggaccctgtgtgactgcataagctacacaccatgcaagcaaccctacctaagaaatataaaaattctagaagaaaacctatgagaaaacctttgttacctgagctatgaaagatttcttagatagatccaatatcaaaaatatgagccataaaggaacaaactgataaactagacaccaacaaaatttagggtgggcatggtggctcacacctgtaatcccagcactttgggaggccaaggtgggcagatcacctgaggtcaggagttcaagaccagactgaacaacatggtgaaacaccatatctactaaaaatacataactagccaggtgtggtggtgggcgcctgtaatcccagctacttgggaggctgaggcaggagaattgcttgaacctggaaggcggaggttgcagtgagacaagatcatgctattgcactccagcctgggcaacaagagtgaaattctgtctcaaaaaaaaaaaaaatcaaaacttctgctctaaaagaagattgtgaagtaaatgaaaagtcagtccacagactgagagatatttgccaaaaatggtaatacattgtaacatggtttgcccacttatgtgccaaccactgttctaagaactttactgaatttcttttacagagaccatatatataatatgtgtatctcataaacaccttatgaagtaaatgcaattttaatcattccaaatatgaaaggtataggaatttaagaacccagctgaatgatataaaactaataagcaaagaggccaaaattggggcttaggctgtctcacttcagagtccatgctgtttatatctcctaaggtaaaaacaaattccacttatttctccccatttttctgtcttttaatctaaggggggctttcaaaaagtcacttcttatttaaaccaactacctttaaaactccccaaacaaggcatttttgacagccacatctgcccagccatgttcaacgtacaacgtcctcttcctacaagccttttccaggacctagcaaactaaggggttatcagcatttccgggactagtatcagcaatccaagggtagcacaagtaattttgtaacacttagtgcctgataaagcagccttgagcttgaattgccacattgcccaacttactctttgggagcaagggacagtcctgctgcagagtacatagtggtttcttatgccctcaaagaatgcatgtgcctctttctgtgacgacaaatctacagagtgaccaaggcattggaacattcacgtttatctgtgtatgagtacactcactgtttccctggaggctatggagaaacaagtatcaagtcctaaaaaggcactgggaatgaagagcacaatatgcttccatacccttgcttcatgtaaacacagggtgactatgacttctaaaggcctgggtgttgcagttcagtgagggcctgatttagtagctagaatacatctcagggaggacagcagacctctttgtctggaggaagggtgtatccatgactctggtcatcacggctttctagcaattctcctatgaatgtttcattctaggttcctactgaggtatattttgggagtctcgagcatttccatgacaaaaggatttgggttagcccattttacttttacaagtgcaagtgaaacactttgatgtaaaagagtcaccaacagactaagttaccttctctgcacagtagaaataacatagcttgtaaggtttatccaaaatctgagtgataattgggtaaactgttttgaattatcagtgccaggaatcttccatgattgcagctttgatgtcatgtaagtgtctatgtctaagaatacaaaaacatacattgcatagcccctagtactctctggtttcatggaccaaaacgtgcaggattgtattccttattcccatagtatatggtagcactttaattttttaatgtcttcatgccttccaaccttcaaaacaaggagcacagtaactgcctctgcctactctgctagcaggatttacggatcacatctttcctgggtattcttgatcttgtggctgaggtacattcctttgaaaccacctcttccaccccaccccacacagagtaactcagtctttctaactttaagccagtcacacagagcatctccaacaaaacctgaaacttaggcatttggcgcttgtcacacccaaggcatggctttctgagatttagcaaattccaaaaaggtcgatatgattcttcctttgtgttacgtattcaaaacttaaattttaattttaatcgttaggatatgtaaaatgtttaaatgtaagtgtgtcctgggcatattagcatagttttattttgccaaacagaggaaagtcttgggttttgaatttggaagcaaattttaaactctaggaaagagaaagatcaatggaacaaaacatctgtacatatatccatttattattatcgtctgtgctcatatgactggctccaagataatagcttacaaccagtagtgctggcttcaccgacttcccatttaaaattacaacattttctctgtatttgcattaatttaatgatgtatatgactatgcctgtctttagaagaaagcccttctgagtttcataattctgattttctcgattaatgtgtatgtagaccatctacgtatgcacataaataaatgagaatggcacttgtttccaaacaattattagaagcagtaacatacaaggattaggggagaggagggttattgcatctacctgtgaaaccagaattaaatagttgctcctcatttcatcaggagaaaggaatgtgctctggggaatagtgcgatagtcataaagcactgacatagctaaacaaaatatctgcctggtgcaggtatttcagttctgggaatggatgtagaaaaagtccatataggggtagacaggaagaaatgaggtccatgtctctttctttcaattatctatgaaaatgaagacaccaatccatgtcatgtacacgaatgaagaaaattcttgggttaattcatctccaagcgtgtctaaaggtgggagggtttgtagagtgaaggcactcaaaattcatttccccattgtctgagaatttttatgcacctttctcatctgaagggctcaattttttcttgaagggtacacacaatgctccaccaaagctcattgtgcaattttattttgaacccttgaaggacagcttttctctaagaaatctaacacaaaaacgcccttaattaacaggcttttttttgcagggtggggcccaagcgggatcccagagactggaagtgtgaattttaatgctttgctgtcaaaggaggcgactctggacattctcatcaccttatttaaagcggggtacgctgactaatacgtgaagctgtgcattaatggcctaaattaagttacaggtatgaattttacataaaacagattaatattatatgtcataatggaattttaaatattccgtgtccatgcatttttaatctttacgtgctctaattgaatgcgcaaggcaactgcatttcttgagcccacttttgcatttagatggggtaaaagaaccccccccacgtttttgttttatttatattcccttcaccaaaaacctgcattcgattcggcattcttttccttctttttttttctacttttgctaagctttagcattttttaaaaagaaaacggaaaggctacacattccattccatcattatggtttcggcaaatgtgaaaaggcgaataatgaaacggaggagggaaatatagaacagaatgaacgtgccttcttgaacagcgcgtctttcttaaggcactggaatcccacggatggagtgatgggtggcggagggtccctgggcgccgtgctattaggagtggcagggtatccgcgagcagggcccaggcgctccctcagcagcctagtcgggataaggggggcggtggagagtgaattccggccgcacattcccgcagttcttcgcaggaacttcgctctctcttttcccctcccttgggcacacatcagcctggcccgactcccactcagctctcttttctcagaaccccgacccacagcgttgacggaatggagtgcccttcccattggcccgagcgtcattccccgaggtggcactgcccgcctgattggctggccactccagaccccccgcccactcctccactcgggtagccggactccccgccccccagcaccgcccggagcccccgccctcgcctctccctccgcgcccccgcccgcgcgcccagcgggctccgctcggctcgcgctgcgacccggcccgcgcgctggtcccgcccccggggcgcacggctctataaatacagctgcgcggcgggccgggcgagagcgtagtggaggaggcgcggttgtgagtagtaccgggagtggggtgatcccgggctaggggagcgcggcggccgcgatcgggcttagtcggagctccgaagggagtgactaggacacccgggtgggctacttttcttccggtgcttttgctttttttttcctttgggctcgggctgagtgtcgcccactgagcaaagattccctcgtaaaacccagagcgaccctcccgtcaattgttgggctcgggagtgtcgcggtgccccgagcgcgccgggcgcggaggcaaagggagcggagccggccgcggacggggcccggagcttgcctgcctccctcgctcgccccagcgggttcgctcgcgtagagcgcagggcgcgcgcgatgaaggcggtgagcccggtgcgcccctcgggccgcaaggcgccgtcgggctgcggcggcggggagctggcgctgcgctgcctggccgagcacggccacagcctgggtggctccgcagccgcggcggcggcggcggcggcagcgcgctgtaaggcggccgaggcggcggccgacgagccggcgctgtgcctgcagtgcgatatgaacgactgctatagccgcctgcggaggctggtgcccaccatcccgcccaacaagaaagtcagcaaagtggagatcctgcagcacgttatcgactacatcctggacctgcagctggcgctggagacgcacccggccctgctgaggcagccaccaccgcccgcgccgccacaccacccggccgggacctgtccagccgcgccgccgcggaccccgctcactgcgctcaacaccgacccggtgagaggccgggcgccggccgtgggcggacgccgcgggggatgggaggttggtggcgtggtggcgggacgcgggcgctcaccgtcctccgggcaggggcgggccaggaatgacagccccctccccctgctcctccgggctcccccgggccgccagcagccggccgggctcggcgagcgcgggtccgggag

SEQ ID NO: 45 - DNA, 6000 bp, Homo sapiens
ccattcccaacccctcagcctgttatagctgttgatgtccctttctggcatgatttaggcactagtgatacactgtctcactacgaccatccaggtatcaggtctgagtggctcgaagtacttgatgcgacagggcatggtggctcacggctgtcatcccagcactttgggaggccgaggcgggtggatcacctgaagtcaggagttcgagaccagcctggccaacatggtgaaaccctgtctccactaaaaataaaaaaattagctgggcgtggtgacgggtgcctgtaatcacagctactcgggaggctgaggcaggagaattggttgaacccagaaggcagaggttgcagtgagctgagatcgtgccattgcactccggcttgggcaacaagagcaaaacttggtgtcaagaaaaaaaaaaaagtacttgatgcaagaaattagacactctaataggaccactgatactcactgtagaaacaaagccaggtttctcaaacaatgggtcatggaaaatccaaggaataaggtctcttacccttagtgttcctcattgttcaaatgtgtactgtagaagcatggtcaaaatctgaaaacatatgttagtgagttctaggaatgtgataagcccttggcactttaagggctagactaactgtgcagttatgtaaaaacaaaaaaaaaataccataaaagaatacttacattaacaaatgggaagaaaaaagccacatataagtatgtacattgggctatcgttttattaaaaaagaatactccaaaatatagtagtgtttatttttggataatgagactacaggtgatttttgttttttcttttggtacttcccatgtttcccaaactttctgtattgagcatgaattactctcttaagttactttacaaacatctcaagtttggtgccaactctgtgttcccatatatggtgttgttgctggacaccacgtatgactccaacgtgtccagaaaccaccggggtcccccaatagggctagtagcaatctagcagcaactccaggcctgtaaggggttagtgctagaacattacccacctcagtggctctgatcagtttgggaaaacctcaataattatccaacttggtaaaatactttaggtgtcccctttgaaccaaaagagatctctgaaaaggcccaaggaactactttatacatcctctacacgtttaagataatctgaacacatagtagagatctgccagactatggacatgggagctgtaatcctcacaagccgggagagccggggagagggtccgagtgggccggcgcggggggcgccaggttgccagccccagacccgaaatcccaggcaggcccagggagaggggactctcgggtggcttctccttacttcgtgtctttgcctttgctcttgcctttctttttgtcctttcccttcgacggcatcttggcttccccaggggctccgctgtcgtagttgcccagccgcggccgccctggccagctctgtctccaagggaaccgggacgccgagctggcaatgccccacccgcgccgctgacggcgcgcggagagcgcacgcgcccgtgacgtagcccaggcgccgcggcgcgcggggtggggcggaggtcgcgccgagggcggcgggctgccgcgcaagggtggcgcgcgcgcggtgagtgtgcgagtgtcggcggcgccggatcctctacgtggggcccgggctctgcgggcgggaggcgggagctggcagccccaggcggtagcgcttcgtcctgcggcctgggtgtgtcaggagtcgctgcggtcggggcgcccttgcctcaggagacttagatccccgctgatccgcccgtcccgccgcagtggtctgagccgcagccctttcccgtgccgcccgcgggtcccgttcctcccgtgtctccatgccgcagccagcgtggccgcggctaccttgccctcgcccccgctccgcttctgccgctcccggcactgccttactcctttgggttgcatctctttcctggcttttcacccttgctgattctgtaagggatagtgcagccagcggacgtcccaggccaaatgttttttgataggcagtcgaggactttcccgagggcggtggttgagggcgaggctgccagcctccgaagagcagcggcacgccagggagccgggcggggaggggagtgctgccaccgaggtcgggagcagggtcctcggcctcactaggtcctgtgtggccgatacttcctgcccacgaccgccccccggatttccatttgctaataccggtccgcagccttctttcctgaaagttgcataaagttggaagctcttcaacttgcctccccgactcctgaaatcccgaatacacctctgaaaaggagtgtactcacaagtattctcatttttcaatgagagtcagtcagtgagtcattaaggaaggtacggtattctgagtgccaagccaatagttaggagacttgtggttgaagctctgctctgttatactccatttcaaattaaaaagtttattttaaatgtggttgtagatccttcgtcaccatttctctagggaggacttaatccgtacactccttcccgatgtctttgacctctaattactcccctccgccttgtttcccacttgcatagtttctgtttctgaatttctgtttcttctgagggaacatgccgatttggtaatgataagccttgtaaacttttttttttttttttctgagagagagtcttctgtcacccaggctggagtgcagtggggcatctcggctccctgcaacctccacctccttggttcaagcgattctcctgcctcagcctccccagtaagtgggactacaggtgcatgccaccacacccggctaatttttgtatttttggtagagatggagtttcaccatgctggccaggctggtctcgaactcctggcctcaggtgatccacctgcctcggcctcccaaagtgttgagattacaggcgtgggccaccgccccggctgtaaaccttttttttgagacaagagttttgctcttgttgcctaggctggagtgcaatggcgcaatctcggctcaccacaacctctgcctcccgggttcaagcaattctcctgcctcagcctccccagtaacagactataggtgcgtgccaccatgccaggctaatttttgtatttttggtagagacagagtttcaccatgctagccaggctggtcttgaactcctggcctcaggtgatccacccgccttggtctcccaaagtgttgagatttacaggcatgagccaccgcccccggctgtaaaattttttttttttttttttgagacagagttttgctcttgttgcccaggctggagtgcaatggcacgatctcggctcaccgcaacctccacctcccagttcaagcgattctcctgcctcagcctcccgagtagctgggattacaggcacacaccaccatccctggctaattttgtatttttagtagagacagggtttctccatgttggtcaggctggcgtaaaccttattatacataccatctgccagcatgatcatggctttttcttttctttttttttgagatggagtttcgctcttgtttcccaggctggagtgcaatagcacgatctcggcccaccgcagcctccacctcccaggttcaagcaattctcctgcctcagcctcccgagtagctgggaatccaggcatgcgccaccatgcccggctacttttgtaattttagtagacacggggtttctccattttggtcaggctagtctcgaacttccaacctcaggtgatccgcccgcctcggcctaccaaagtactgggattacaggcgtgagccaccacgcctggccgatcatagctttttctgagtgtatttctggtatactttcacactcccgtgagtccataggcggaatcgccatatattgaagagtttatctctgatgtaaaatctataaagttaccattaattttgtatgtgtaaggttctgaaaaagcacactgttgataagctgcagaaaagagagtagggcatcttctgtcacaggctgtatatttggaatttattctagaaattggtaactttataatatgaaagtcagtccaagactcctcatttgaacataggcttacagattaatgtatgaacataaaaatttgactataacaagattattaatgtatgcgtagtaccttagttatagtactttatagtttcttttattggtttttgggttttttgatggtttttttgagatagggtcttactcttaaccatgctggagtacagtggcaggatcatggctcattacagcttcgacctcctggacttaagtgatcctcccacctcagcctctggcatagctgggactgtaggcatgcaccaccatgcctggctaattttgtattttttgtagagacagggttttgccatgttgcctaggctggtcttgaactcctgagctcaggtgatcctcctgccttggcctcccaaagtgctgggattacaggcatgagtcgccacacttggcctagtttattttattgtattatatatattttttattgactaagtttgattttgtagataaagctgttgtgacatgaatatggctcagggaaatgccaagatttcatactctggtagaggtggatatagagtctacattcttctgaatcccctcattttctaccaaagaactggatgttgttactgtcatctgctggtgagcaacaactgatagtacagatagtagagtaggaagttgctatttagtagtttatctggtagcatttccttccacagttactggtaggtgcctttactatgaagttccaggaattattactaaataaattttccttgtttcattgtttagaacactaatgcttttaaacttggaataagccacttcatgttttgttgacttggttttgtaattctttttctgtccagttttccttgttcctggtcaacaaagaaatgtggagtgtcttggctgaatcctcatacagacaagatcattatggtgctgttaggtaggacttgtatccagatgtaaggtaatatctccactagcttaaatttataaatgtatttcaaatgttcctgaatggtggttttctttttttcctgaatttaattctctgttttttgccaagtgatgttaattttgtccaacaagccatatataaaatttagaactattatgtatcaaaatagatagaatttctggctggtcatggtggttcatgcctgtaatcctaacactttgggaggccaaggcagacggattgcttaagcccaggagttcaagaccagtctggacaacatggcaaaaccctgtctttacaaaaaatacaaaaattagctgggtgtggtggccatgtacctgtagttccagctactcaggaggctgagttcagaggatcacctgagcccagggagatcatggctgcagtgagccgtgccactgtattccagcctgagcaatggtgtgactgtttctcaaaaaaaaaagggggggcggggggtgggtagtacttctgcttttttcttctagtaggtccaaaactgggtttactttataaattcatctataactttattcgggtttaccttagaggccatgtttcccttcataaatcattcttgagatcaccttatagcagatggtactttataggtggatcagtctaagtgaacaactttagattttgtttctacatagcctttagaatcctgaataaatatattattatccaaactgtttcttatgggagttactttctttttttttttttttgagaggtagtcttgctctgtcgcccaggctggagtgcagtggcacaatcttgtctcacttcaactctgcctcccaggttcaagcaattctcctgcctcagcctcccgagtagctgggattacagatgcctgccaccatgcccggctaat

SEQ ID NO: 46 - DNA, 6000 bp, Homo sapiens
ttggtcaagccacaaaccgtctctttttttttttttttttgagacagagtctcactctgtcgcccaggctagagggcagtggcgcaatcttggctcactgcaagctccgcctccagggttcatgccattctgctgcctcagcctcccgagtagctgggactacaggcgcctgccattatgcccagctaattttttctatttttagtagagacagggtttcaccccgttagccagggtggtctcgatctcatgaccttgcgatctgcctgcctcggcctcccaaagtgctgggattacaggcgtgagccaccatgcccagccccatctctttgtctacaaaacaggaaggctgggccacatgacctctatggtatcgccaacttcaatcttctggccagtgcttctcaaactttggcttgcatcagaatcaccaggagggctggttaaaaccaggtggcctggcctcactcccaaagcttcaggttcaccggcttagagtgaggcctgagattctgcatttccaagtcccagatgatgctgatgctgctggtccagggaccacactttgagaattactgctctagcaaccctgggtgcacattagaattacttaggggagctttaaaccgtatggtgatgaaacccaactccagagcaattaaatcagcatctctgagtggggagcctgggttttggtatcttttaaaagctcccctaggtgattctaatgcgccgccagcattaggaactgctgttctagaaaagcagcctgacgtgtgctttttttcctattggaataatttctcttggaccccagctcagcctctcattagctgcctggttttgaacagtctccctgaacctcagtttccccttctgtaagtggggctgttaggaggactaagtgaaactctgcttcactgtgtctgtccacccttccctgtgtccaaggagagcttgtacgtttcttctgctctgagactgtttggctgaacacaattcaataagcatttattaaaaacttataatgtgtgagatgctgcccttaatgatgtgagaataaaaggatgaatcaggctcggtccccactcaaaagagctcacatgctaatgggggtgacgaggcatgtgtccaaaatatgaagcaggaagtaacaccggctacggaggaagtaatcatggtgaaggccattatgtgtgaagcacttcgcagtttattttaatcctcccaacaactccacgaggcagctactattgtaacacccacttttacaggccaagaaactgaggcttaaagagaggaccagttacccacagcacaagagccaggctttggtgctgtgggagcccagaggaggagattcacaccattagaaaggctgggagtaagttttgtggggagaagtgtggacacagtgctttgaagaatgtgtaggagtttgatgggtaaatacagagaaaagggtatccctgataagaaaccagcatacacaagctcagaggagggatagcttctcttctttagagacccggaagtgatttgattttgctggaatggaggttgagtgcagggcatggtgggaatcacgtcctggttggaggccttgttcgctaggataaggaatttagatttttagactttatatcttttttttttttttgagacagagtcttgctccgtcgcccaggctagagcacagtgacacgatctcggctcactgcaacctctgcctcctggatacaagcaattctcatgtcccagcctcccgagtagctggaattataggcgcacaccaccacgcctgggtagtttttatatttttagtataaaattattatattttatatttttagtagtagggttttgctatgttggccaggctggtctcaaactattggcctcaagtgatcctcccatcttggcctcccaaagtgctgggattataggcgtgagccaccacacccagcccaagattttatatcttaagcaatggggagcccttgaaaactcttgagcaggaggtggcagttttagaacagggctaaaatggtcacaggttatatgggagagagagggtgacagggagcccagggacgaagggggcagctatgacaaagggtctgatgagggatgataaagcaagtgggtggggaggggggaaggggaaaataggcacatgtgagaagtgtgctgttgctacacaaagcttccttgggcatcagttgatcccttatgtgtatttgcttattgactgagccctaccataccaggagtgggggagggcaggagcagaagacagaggctggggcaagtggacctcccagggttctcactccacatgcagctcccctcgcgactgggatatggtcagtgggacatgacccattctgttgaacaactctgcagaagcagggagcaattggttcttgggccgtctgctacatttccgtgatggaggtggcagagctggcccagcgacctgagtcttcctgaccccagccttccaggtgaagcgtgccaccctgctcacctcccactgccaagttcactgccagctcaaggctcacagcctgtgtgtgtcatgcccagcacaaaccctcccgggctgaagccagttcccagaggcaaagtctggatgtggaaaatgcaccaggctgcaatcctgccacttgccaccaggtgactttgggcacatccccttagcccctctgtggcctaaattggggcattaaacacaatcaggtagtacaggtactgcaccctccacccccacctgccccatcctctctggttaactttcctggagaatctcaagatgttacagagacaagcaaagcaagtcactttccatattcaaagtcccaggccattttagtacttctgtcattctgtggacccatcaatatcatacccattttagagatggcacaaccaggacccagagacttttcatgacggcccagggtcagatatctaggtagttacggagacaggacttgaacgccagtctctcagccaatggagctgacccctcaggtgccctcccagacccctgcgtcctctcatgaggtagggaggccagatctgggttgggggtgaggctggcagacatccctgaggtccagggatctggaactgagggacacagacacagcatcccatccctttgctgtatcacacaacgagaacattctcttttaagcctcctgatatgtgaaggagaaagtctctgttaggtgctaatgggtatttaacacctctccaaaccttgccaatctccctttttcactgagggcacacatctcaagccttggcaggccacggtttccagctggaatttaataaccttgctttgttttcactgtgcttattttaactcttactttctatttatggcaagtgatactgatttcccatttaaggcagtgatataatgattctctaaaaaaacgtgtttaaggggtggggaaagtggatctgatattttaaaaaatatattaagtaataagtggtgtggagatatggcccagtgagaaggcccgatgtctggcctaggtcaagcccctcatttaaaggtggggagggagaatgcaggcaggagacgcaatgctcaaggcacctggtgtgtccccgtcggccgtggtctctgagactcgcatgcctcgaagacctctggctactaagcctaggtgactccccgcccctctgggcgacacgtgcatggcccatgtgccagtccgcagggtcccgtgggcaccgtgagctcgggagggaggcggcggctgggacaggcaggttggacacctgggagggcacccggggacttccgcgaaggaggagggcgctggaaccgtggcgcgctcgacctggccgggcgcaagccgctggagaccccggccgagtgggcaggcggccggaccccatgcgggtcacctgcggccaggccgggcgtgcgtgtgagcgcgtgcgcagacgtcagcctccgaggcccgggccgccttctgggcaaggtgcgcgcgcccagcggccccggccccacgcgcccggacacgcggaaccgcagaccgcggcgccccggaggccgcgaaagggatgggcggggccgggccgcgggacccgcctcccattggccgggcgccggggcgaggcggggcgccggggtggggcggggcgagcgggctctggggggcagacgctggcgctgggcggcgggaggcgcggctcgcggggggccgaaggagcaggtgggcgacgctcgcaggggcgcgggagggtgccgctgggaccgtcatcaggagcctggggttctgccacctttcggagggatcagcgacctcttcgccctgcgggtgacagtggggcatctgcctgcgagagggggaaggagggagaacccagggccacacacaaagttctcctcatctggggacaggaggaggtgaaggaggaggagccgggttgatgctaacttggagctgcgaaaccttggggcggcgttcaaggccccctcccacacgcgcgcagagcagagcgccctgctcctccttcagctgctggcgtcgccgcgcggggagaaagaagccgtccctccggcgctgggagagctgcagagccgcgggcagagaaggaggccgcggccgagcccggcagcccgataccccccatccgagcgaccccctttggggcaggcggagaaggtggcataggcgaccaggagggttcgcccacctgggacacgcacccacagtcacctccaaaggaccccccctccccaagtctctaggagctgctccttcatcactggagtcgcccctacctctctgcccccagcccgagagccccaggcggggacccccggatcggacgtccccaagcctccgggcacctggctcagcaggaggcccccggctcggggcagggcagggccggcggcggcgagccggagcccgccccctgcccgggccccgccgagccctcggagcccacccatggggcacctgccccttgcgcctccttgcccggccgcgcccagcccggcgtcccgagcagcgcaggggaggatccccgcgcagtgacccgggagccaccacagactctgggaggctcggcggctggagcagcaggcagctccccgcagctcccggcgcttccaggcagctctctgagccgtgccagaggcccggcccgccattcccaggtaggagacgccccaacagagctgggcatctgggggaagtggagcagccgggaagaaagggtagaggcttggaggaggaaagctcagtgattccttagatgaccagagaaagtgaaattgattgagcacctactatgtgccgggatcgtctggcaactttgcatacctagagagaattaaattcgttgagcacctactgtatgtgtcaaactgagtgctatacccttgacttaatcccaggaaagaaagatttattgagcttctactatgtgctagttttggtgccacaggctttgcatttaaagagctagagtaatagcccatttaaataggaggaaacgggggctcagggaagacgagtcaactaccacaaacactcctgtccctcttctggagctggctgcagcctgcattacctggaggtggggaaggaagattaagaagctccttcgttatccagagttcttgagctttttctgggttggtgcagagtgagtttcctggatgattcccttcccaggaggggtttcctgtaacttagctgtcttggagggcccggaaggcagctctggaggcctctctgtgccctcccctccccttgtccccagcaccaggaggatgacaggggatgttgtccaagacctcatggaaggtgggaagccaggctgggagggagcagccaggtcaggagccagtgaatcaagcctcctgtggtgtcagagacaagatggggtccctgcaagacctgcgcctgcattccagtccagcctcaccaggctgctctaggcagccccacgactgcc

SEQ ID NO: 47 - DNA, 6000 bp, Homo sapiens
cctttcttttttcttccactgatatactgttgaatgatttcctgtcattcttctactacaatagtcatcttgctgccaatctattgtttctccaacatatccatcacattactattaaagataccttattaataaaatgtgggattatattacttctctctttaaatatcttcaagttctctattgcataataaacaagcctatatttcttaagtggcatttaaggtttccccaaataaatacaatctgatctgaacctactatttattcatttattcactcattcagcaaatatttattgagtacctactatatacgaggcataatgctagatatagcagatacagtgatgacaaaatcaaaattcctccatacatagcttacattccagtgggaaagtcgcaactcttactacatctttccataacatcgggtctagtatgacctggggataatttccatggaaacctctgctcaagctgttcttagttctcaatgatcttccccatctgtcaaacatcaaaattcaatgctaaattatctatgatttaatggcacttacttttatgtttcctgagtagttgtttacatttatgctatagtacaaatttatcttatataattactgatttatttattcatcttgccttacacaaaaacttcttgaggacaaggaattgattttgttcatttttgtccctttcataatactttgcatataatacaaactcattattattctatttgttgtaatcaaatttgttgaatgattttgttgaaacataaacatgaggaaatagaatgttattgaggactgggggacacagttatagttactgagtgcctatcacataacaaaagttatcctaggtgtttttcatagactatatgatttaattcatataacttcacaccacaggaaactaagtcaagggaaatgaaataatttagatatttcgtagatatttcgtcgtagatactggccaaaccagaacatgaacccagatatttctgactaaaatgctcaaagcttttctacttcactacataacattctattttgtcactatcaatcctataaatgtattaataattttaattttgtggaccagattttccccttttcaccttgatcaaagataatgtgattataaaggctgagattttgtgaaagcttttgtgccatgtttgatttcaaaaatcagcaaacattttgtaaatttgggtgttatttttgtcttacaggtacatgtcaaaaaatgcataacactgaaataacagagatttaggcatagttttgataaatacactagtataattagaatatcccaaacataaacttttctgaaagagagaatttcatattaagaaaaaaagttggttttgtggcccctcgtcctactatatatatatatatatatatatatatatatattttttttttttttttccttaaagctttcagtttgtatcccagtccctctgtgaaacacagaagctataattccactttggcactaggtcatttttgttaatattttggttactcaaccagagtcaattgttttagtttccctatctgtaaaggaatatccaaaaagatgaatactgaaactcagataaaaaaaaattcatcattgaacaaaaggattagaattacgcccaacaagaaaactttgtactgtattagaatgatttaaaacaattatcatatttgtaatttattggccataaaattacttcctcattttggaaatattactttgctgtttgcctggtatttaatgtggtatcttttggtttggtatataccatacaataataaaatattagacaacatggatgattaattatcattcaaaaaaattgtaattctatgatggttaaattctcacttgcatttatttcatgtaaaatatgatataaaaacaaaattagcttacccctgctctggtttaaggaagattatactttaaaagtatagtttgctaaatagtttttaactagttaacatccacgatcatttatttgtaattacatacaagttgtttttcattattggtcactctaagataaacaagtacttctgacatacattgttttgagggtgctttactttaaaaggacttggaatcaagttggcaatataagtagaaactacaaaataaattcgaataaaaatttactaactttctccccttttctcactcctgagtaaagaggtggctctagacagaagagtgccaaggttctttgttcataaaccttagttttcttatctgcagaatacggatttaaaaacctaatcttaatgaggattagattatgtttgtttcagagtgagagcatataatctagagctctgcctcttaccacttgagtgaccttggccaacttacttcacttctttgaacctttgttctactcatttgtaaaatggggctaacatagttatctggcttatgtaggtttgcagctaccactggtataattttcccttttacacagcgctacatgttctcagattagcaaaaatattatatggaaggggactcaaaatcttttctctgaatgagtcccttcttactgcatctgctttcctagggaaacaaaattacacagttccatctctgtttgtgtctagggtacagcagtcattcgtggcaaaggatagaaattgccccatgaaacctccaattattcatgaataactggacagttgaaatttctgccccctccagaatgttaaaaaaccagttcataaaacatagtcttctagatgctacataaacaatgaattcctatagaaaactcttctaataatgaaaaacaacttgtttgtaattacaaataaatgattgtgcatgttaactaattaaaaactatttaccaaactatacttttaaagtataatcttccttaaagcagagcaaaagcaagctaatataagaagcagaaaaaagtggtatacagaaaaaagaaaaatagcaagaaatttaaattgctgatcactttttctctatcattaacaacttatttccttaaccaataataaagttaaattgagaaagaaggggagacaatttgtaaagctgattttttgctttacttattagtttttcaggtatagttatattgtatccattttcgtaatagctctcaattgtctcctttgtaaattaatgatttactaagtagatggctgccctcttattagagacctagaattcaaaattatgttaaagtgccaaattatgcacacaaccacttttattattaaagaggatttatttaaaaaggtatacatttaaaactcatcccaatgacagtagtatgaatattctgataccagaaagattccctctagaatacataatatcaaaagttgtctttaatttggtatatatgtggttcagtgctattcattgaactttctatgtatgtggggcaaaatattacatccacaacacagaaccaaacgtggtgatgacactgttgtgacactgttgcatgctgacacaaaacctcacagcatctagtccaaatctttgcttcactatttttattttatttgaattaactgaaacccagaaaacaatataatacatttccttgggacgtatactcactatgcgtctatctcttcaactcaatgggatttcaaatggagagaaagcaatttaccacaacatccacaagtttttgtcaacattatagacaaaggatcagactttggagcccaattgccagggttcaaatcctgcttccaccagataatagctgtgtaaccttgggtaagtcacttctttgtgccttaatttgctcctaaaatgatgacagtaaaaccacatctctcatagggttcttatgaggagcaaatgagttactgcttgtatagaagttgtaatgcagtatacattactaatagaattggcaataataggaagtgtactaagaatctttttatcgctccatcttttgtcagtaatgaaaaattttttaaaagtctgagaaatttcaagtcaacaggtattcataaaacacctactatgcctggtgccttgggaacatagaataaattgggaagttacagtctattttgaatttggaataaatggaaaacacagagcaaagttcaatggaacatgcaacaacaaaaatgctagagtgccacataatttacctaagtaaagctaacagcaaaatcaagtactctaagatttatattaataaaaacgcaactaacaattggtaatgtatttattttcagatctacacagaagttgctaaatacaatgctgtacatcaacagaagttctgcagaaatagtaaaattttcctttatctccacctgggaagtctgaaaacatcatagggcttgtgactggggcctaataaccccgaggacaacgtggtgggctgagcgaatacctcaatgtgcgagagaacgaaaagctcgaaccacgaccgtgcctagggaccaggcttttcctgtggccgatgcggggcagatgcagacccagaggccacccttgcgcgcgatctccaacccgacggtgcggctcctctcggacctggagctgtggggagaaggcagccttttagtgaggagccgccgcgtggcgggacgcaaggaaaaccacccgagccgctgaacagtattccgcgactgcactccagggcaccgggaccgccagggtgaggagggactctgcgttctgcaaagctagcggttcccactccacctcccactatctcagcgatgggcacgcgagcgccagcccgggcgaccgcgggggaagaagcggtccacgccacctcaggcccccgccccaggctctgccagctgggggtccaccgcccgcccccggggtcccgggcctgcgcgtcacttccggcgcgcgcgcccgcctgcgaagatacagtcgggccagggcctggcctgggcgcgcggctgcccgggggcgcgcagagagggcggaccgcgcgaagggggagtgtctgcccgccgccgccactgctgctgccaccgccgtcgccgccgccgccgccgccgccgctgctgctgccggtgctaaggagttcgctggagccctttcctcagacccggcccggtcttcgcgcccggactcctggcgccagcgctaggcgcactcaccgctctgacgggtgcagacgcgggagttgtcccagactgtggagtggcgggcacggccccagccccccttcccttccctgaccccttcttgccatcgccccagacatggggaacgcggcgaccgccaagaaaggcagcgaggtggagagcggtgagttgaaggccgggtctgggtatccgctgggcgggccggcgcggggcaccgagcgccctccgggtcgcagcttctgaggccgcgggcacgggccaggcctagcagcggccgccgggagtcgttctggggggccgggagaccagctgcctttctcctccattccgaccccccagctccgcgttgagagctgaacgcgaagggccggatgtggggatcctgggaagagcgttccctgggattccctttctcactctagcgaggaggacttgcacacgttctggaacacttccccaaatatggtccgaggaaagaagtccctagtgccatcccacccctgctttcccccctcgccgactctttgggagctacaggtagtgctgtgggtaaggttggctcttctccctccatcacttgggtccgacccaaccttatcacaaggcgggggctgctagtctggctctacgcaagtgaggctaatcctgagtggacaaccctgccttagagatccttcatctcttcagattaggaatggaaaacataatgagacccaacagcaactttatccattagagaaaaaagccaggcaggtttgccttttctctagacattcaaggatctgctaccaatgcctgtaaaacttaaaggtcattcggagttgaagtgcttccagaacacggttaatttcttc

SEQ ID NO: 48 - DNA, 6000 bp, Homo sapiens
ccaggcattgttccaggctgtggggatacaagtagtgagcaagaccagccttctaacagaggagccagtcaaaacaaacatatacatagtttatataatttcatgtagtgatgctgctctgaggtggaaaaaggtaaatacattttaggaacaattgtgggaagaggagggtgattttcttttatcttttttccccaaagcatagtttcctgcttcatagtacttattaaccaatttcttctaaaggtagcatttcctcccgtcttcggtccttgattcctccagttttttttttttgccaaagtttattgattatctcttcaaagtgtccataaatacatctcctcctcacttttctagaatcccacagacgcccatcacctcatgcctagaatgttgcaatggcttcctaattggtctccttacctcttctctctacaaacttttctccctcagccccttccaccttctagcctgtgtagattattcttcctgggatgtcactgcccatgttcatcacttttcaactccacttcaagttccaggacaacaatgaggtgtaaaaacctgggcgttggagaaaggcagcctggaggggatagtctgtgtgtccctcaggttcctcaacgtaaaatgcagatgataattctcccgtgagaggtcatgagagggaaatgagaggaggtgtgggaagcgccagtccagttcccggttgggggactctcacaatggaggcagcatctgatcctcactgctgagtcaagatggtccattgctctcttgtctcaatcctttagaatgtatttggtgatgaactgctgtgttaacattgtttttcttatctatccaactagtttgacaattctcttaggaaaactgaggcttttctactcaaagcctcagggaattctgcacatagtaggcattctgccttcatgattgaacaagttgggcctgcattagagtgtcaggccagggtggcaagtgggctgaagtgcagcctgcactctgctgtgaggctgacacctgcagggctgcacccactcaggcagggtggaggcccaggggggtgcaggacagtaagtgttcatgctctcaagttggagctaaaatttcgaccctgtgaagacctccctgacacctccctgtgcccactcccctacggtgacacacaaagttgtgtgataatcgttggtagatgtatctctctcttaggctgcctttactaagggccagtgctctgtgttcatatagttaattcgggtgcctggtacttaggaaagcattcaatagtgattatggaatgaaagatgactttcaaggaaagtccgaatgggaggcagaaaaactgcagcatcaggacagagttacagataaaatttagaaaggagacttgaggtgggaggagtgtggaggctatgattcctagttattactctgagtggaaccattatcatgctagctcaaacttaaggtacaagagacgtacaaagcagaatctttgcatccatggatgactacagactttgttacaatctgttatttttttattttttaatactattttatgtatactcacatgaaaaaatggttatactatcatgtttacataatactaatattggaaacagaattcagtaaccaattacatttaaattttataaagaacacacaaacattaaaacactgattagttatagaaagcagagtttgaggaaaaaccattagctataatttttattttcattaaagagcagcaccctctgagaagaatcaaaccaatcagtaatattcatctatatcataaagtaataagtacaaaggaaagctagtgactgtactgattttattgcttttactaagccattttatgttcctcacactcaatgagaagaaataaaacataatctgaagaaaaatatctcattattattcgcaataaaaaatctgcttcattctgcaggcctgggcagattgtacaatagagagcacttaatggctcaaatggatcaatgtaccagtttgattctgatccacggaatagaatctcatccatatttggtggctggactaactccatgggtgctgtgacagactgaactatttttgtggtatccccagatctcactaaataagaaaagaccctacaccagaaaatataacaatcaatccgtccataaattttatctatatgcttgctcttcagtataagttggaaaaagaggccctttcttgaggacatggataaaagtattatggtctaaagattgctggatcgatattgtgttgttataataaagataaggtacacattgaaaccactgtctgattaagaaacttccacaacttgtctcaattcttcaaataatggagtaagtttcttttctaggctgacaattagttctgtattggcattgctgctggctatgaaactcaccaccaaaggtaaatgatttaactgaatcaccaggtaggtgtaacagtaacagatgatacttttattttttgaaagtccaagtttgctcccgtggtctgttgcaagggcaaaagtaggtaagaaaccaggtctcaaagcatgctctggagcattatcaatggccactttaataacaggtactccaactctgacacaacaatagcatggagcccttcaacactttgtaacatttgatacatgaatcgctttaggtcatccgccatgatgaacccccttctcttgcaggatcaatctccttgcctggggtttctgggctgcccggttctctccactgtcacttcaggaacagcttcaaagaccacagtctggttttatgctgggtatatggcaaatgcaaagaattggctctctcttggggtaaggaagctgcccttcctaccactgttttatagcctgagggagttcgtgttaggccaagaccttatcatctttcagaaaacagatttcagttttgccgtggttttgaggtcctgaaccaaaatttcactggcggttctaccaaatcacaacctctgagtctctcctttcatatgattcccataacagaatgttttggtggaagttctattaagcagtaaaaccacagccaatcaagaaatcactgggaaagataaagcgaagtctagctttccattaaccaggacagtcagcttctgtaaaatggagtgtcaacactgcgccttctgtcttaggccaagcattttctccttcttggaactcaccagatcttattgttcttgagcgtaatggattaactttctatactagccttgaggaatacatgataggaattatatcagtgacagactaatgtttaggcaggaaaaagtcatcatcgtgcagaaatatcctggtatgtaaatgagaacgtacagaaaagagcagactagacatactctaaatcaaaggcctgccaagagtcaagagaattctgcgaactgagaaagactccatgccagaagcatgagccagcgctgcagaggttataatttctttctctgcatcttgtcctctgcattatgctcatatacgagaaggaaactgagatagtgattgggccatttcttttcttaatttaatttttaaaaacttgagccacaaggtatcaattctgaggacctaattagtttactggcaataaagtccacatccagcctaatccttaatatataatctgtagcccttaccggtcccgctgtttcctggtgtttctcacccaggacaatctcaaacccaacacatagccgggtgcagaggtatctgggccagtgtagaaagaagactttgaggttaaggcatggtatttaaggttctgctgcaaatgttgttttaaacaaatcaccgttcaactacaacggtataataatgcaaaaatagcatctgccatgaagaaagtgcagtgctttgagaactagaaaaagcagttaaatttaaggccttgctttacatttcggagccgccatcggggccaactggaggtatgactttcctgcacacaggagcaagctgaaaactgccctgtggctttattccacgttcacccctgcagcaaatgccttttctgtgaggaactacgggctgatggggaatcagaggtggttcttcctaagtggcgtttctgagtgggttccaggagtccacagtgactttaagaggcaggctacctgggggacagccaggccgtgagacgagaaagttgtacagtaacattgctgtgtgcccataagtttgtatcttttattagattagataatatatctcacatgctgggttgttaagcaaataaatatgtgtaaggaaattacaatccacataattacatgagtcgttttaaccaccactcacccccagagtgattagattttcttctgcctatgccattgcggcccagttgctctgtcactgtccatggggacaggatccccttactccgaaaagcaaatcaggaacaaacagggcaagtgagagtcactatcagggcccagaaacatgtgaggaacagcagctcagaagggtctccagactgatgggccggtgatcctatattcttgttgggctgacaactcttctggtttcgggctccaggtgctggcaagaaatctcagaggtggggtgggagagagagacgcgaggcgacccacgcagacaaagggctcccaccccacccccgggccaccccggcaggccgggcaggggccgagcctggggtcgcgcagggggaccgagagggcagcgcggggctgggggtggggaagaggcgggaaccgagccgcaggccgctgcgaggagtactaccccgccacccccgcgccgcgagtttccgcgcacgtggccgtggggccggtctcgctcccgccccccgccgggcccgcgcagccccctcctctgcggctcccggagcggccagagcgcgcggcggcgggcgggggcgggccgcaagcagggctccctggccgctttccaggtcggcgcactaatacgggcgatgaggcttcgcggctccagtctgactgacgccggctggggccgccgccgccgccgccgccgccgccgctgctgcagccgctgtctcggtccccgccgccgccgccgggccctgcaggcgctgggcgcgcgcagccaggcagtgagtgcgcggcgctcggagcgggcggccgggggaccacggcgggggcggggttgggggcgccggacctgggtgggggagggatgagtggcacggcggggacaggtaagacgtgccctcctcggccgcgcgctgcttgtgtgcgtgcgtgtgagcgcattgagtggagggcgaagttgttcgtcctcggggcagcctgggaggctcctcggcgtgaggcttggcttttggcggtcgttgttcccgggttttttggtggagcctgtctggggtggagtggggtggggtggggtgggcgcggggccggaggggactgctctggggagttggccgcggcgcagctcgccttcctcgcgcctgcatccgcccgcgccgcgggccccgggacctgtcaggggatgttcgacccgcggcgggggcggcggtcgggtcggggctggggcccggggcgtgggcagggaccaggataggcgcctgaggggtcgcttgctgtagctggagataggggacagcggacagagggggcggcgggggtcgtcattgtgactctttgggggccacttttaaactcgccagcgccgaattggcctcacttgccttctgtttcgtaggctttttgctttgtttacctttgaggcatgcgaactgagaaaaaaagttaggaatgttgttgaagtgtctccgggctcgcgcttggactgtgtcggagccggggtgtttgtcttttccttggcccgcccctcggtgccagctctccgcagaggggagggggcgaggtgggaagcagatacaggagactgcctgacgccagctttgtgatcggaaggaggagcgctgggagaacatttttatggatggctaatcgctgacaagtttt

SEQ ID NO: 49 - DNA, 6000 bp, Homo sapiens
tgaagaaaatttgaccccacacggacatgtagtaggaaaaaggaagagtattttaatagcctcttcagataactgtggataatctccttcattattaaatcaaaacataacaaatgatagtgtcataaaaggtacaacttaaaatctgcttctaaatacatgtttttattccattacattaaaatccactgggtgtctcttatactttgagtggaacttttctttgtgactttgtaacatgatgaattgaacatttggaaaatattgcttcactgagttatgcagatattccaaatgttgagcatttcattatatataataaataatcacatttgttaaaatcaccaattttgtcataaaagttgttgcatatcaggaaactatcaagcttatggtagcagatacaagttatccaaaattccaatttttactgcaaagatccagttttatcactggcaacaaacagtgtcagttattttccttcaagggataggcgcactttattcatcttcaaatgtctgccaaatatccaagtctgaataatcataatttatcagtcattgttctttcaattaaattggaatttcatgaaaaaagtagcaagttcactatgcttctctctctctctctttttctttttttgagactgtctctctctgtcacacaggctggagtgcagtggtgtgatctctgctcactgcaaactctgtttcccaggttcaagtgattctccttcctcagtctctggagtagctgtgactacaggcacctgccaccattcccagctaatttttgtatttttagtagagatgggggttttatcctgttggccaggctggtcttgaactcctaacctcaagtgatccacctgctttgtcctcccaaaatgttgggattacagatgtgagccactgcggcccactatacttctgaaacaacggtacaaatgcttttctttgagacaattgccctttggtgtgcagcagaagtgtttgatttctacgtcttattttcccatgtgagtataaagagctgcatactctcaatttgtgcttccagttaagatggaactggatttgtcatcccacctaaaatatattaaaaatgacattcacaatggattggataaagaaaacgtcacacacacacacacacacacacacacacacacgcacacacacacacacaccctggaatactaccagcaattaaaaataacaaaattttgtcttttgtaacaacatggatggaactggaggccattatctttagtgaaacagctcaactagcacatgttctcacttataagtggaagctaaataatgtgtacacaatgacatgaagagctgaataatagacattggagacttggaagggtgggagggtaggagggatgagaaattacctgatgggtaaatgtatactatgttttcaggtgatgcttacactaaaagcccagacttgtccactatgcagtatatccatgtaccaaaactgctcctgtactctctaagtgtataaaaatttttaaaatgatgcttaaatattggaaaagaggtatcacaggaaagtggtgagaaaagggaaaatgaaatgagatgagcctgatgttttctccagcttactgctttgagagtttccaggatgcagtgcaggtaggaggagtccacacagagctggtggtctccatgagatgaaaacgcagacgtgaggagctctctctcctcctgtactctgtcctgctagatttaaaatctagcttcatggagagacagcttcagaaggcagtaaaacaacaattttattacttcatcaatgacattcttaagtgaaactggctctttttcttttcttttatcgtcctcttctttttttttttctttatgcgtggcagtgaaaaatactaagatggctgggtatggtggcttacgtctgcaatcccagcactttgggaggccgaggcaggtagatcacctgaggtcaggagttcgagaccagtctgaccaacatggtgaaaccctgtctctactaaaaatacaaaaattagcagggtatggtggtgcatgcctgtaatcccatctcctcaggaggctgagataggagaatcgcttgaacctgggaggcagaggttgtagtgagccgagatggcaccatggcactctagcctgggaaataagagtgaaactccttccaaaaagaaagaaagaaagaaaaacacaatgactacaagtatagattttcctcctcaatagtacagttttgtgtcctgtattgacagttgctaaggtgccagcatttttacccatcattgcttttgcaacatcagtgcaaagtctatacagtagaaaaaatgaatcttgttttggtattattataaaagttgatttgactttggagacagccaagagggtcttggggaatccccagtatccatggaccacacttttgaaaactattgttttaatagaaccttctggtcattactactttgatctaatggcgccactttaaaggtgggactgggtgtaggaacatcctgccatggcagcttcatggagaagatctgttttggcaattgggtccttcatttccttcacatcacagtatggaatctatactataatggaggtaaaaatttctccacttgagaacagtgttatcactgtatatacaacacattttttccatgatgaaaaacagggtctgaaactttaattaaaatggaaaagtcattagttatcttccatgggaagagtttgaagaaaggaaaagttgaagtagggcaaaaatagcagatataaggtatttctaaacgtttcccaaatgaaggaagagagaaaagaatgagcgaaggaaaggaaaagggtatttagtgtgtaagacactagaaaagatatgcataaggaatgaagtgatacatacatagtggtgttggatttgtagattcttggaaagttggcagaaaagcttacatgtaaaaaaaaaaccaatgtattgaaatcagtctcactagctatgtggaatgttttagatttgtaccagatacaatacgtttgtggtggatacaggagatgcgctgcccagatctgcccccagggaaggaccctgctccagctgttggaggccggctggcccacagcctctagcagtcaagctcttttggctggaaagccgcttgcaggaaatcactccatggaggtgcagagataaggccccagacattttggcccagtatgggacaactttgaccgtctttttcagcttcaggactcccatggagttgggtgaggttgttgggcccgctttgctgctaacttctccctctgttctctcctgttccccttcttcctcccacaggggtttgtcccaagggcactccctaatacacatcctgcatgttaaactcttgtctcagagtctgcttcctgtagataccaaactgtaagaacatcttattgacttaaatataaccaaaattggagaaacttaggaaacaaaatcatcattacgttatgtgctgacattttagcttatttctatatttcttgttttgaattgctcatacttagcatgatagtacctctcacattttgtttcatttaggtttgctatttccacgttctctttcttataggaaccatattgtgaaaagacataaaggtaatagggtaaaaaaaagcaaataggctctttattacccagccactcaggaaatgcactatttcaaggttgacccaggcagcaagagaggagctgtattggggaatgtgacagtggtttagttctgaaactggagccagtagaaagttctgaagggggtccgatgatcagaactgtctgtgggtttaataaaggtgtatttaattttatttaagcctggagatttaaattgtcactcaaaactctcagacatgaatagggttagcaaatctgtacaccaggaaaggagttatttacatcctgtcttctcctacagctccagaggagggcagaacagtgtatttccaggcaagccctctctttaaaaactcatagccaaggctgggaagacagagtgagtgggtgggccttctggcagcttccttaccttcaaatctttgctctctgtgaaatggttctgcttcagtatccttgttctgatttttctgggaactagatgttactgggagatgactcagagcaggccaagccctgatcctcactgtggaagcaaaagaggctggtgaaagtcactgtcctgacaacttggaccagaaacctacagacaaaactgaaatgttttcctgccctaggattatctggataacaatgacctttgatgttacaaagtaaatagaattgtgtttggcttttccttttggggccatgccttggagaagatgactccttcagagccgctgtgaatattgtagatctcattatttcagataattactttgaccatccttttcaatttgagagtatgatgtgaggcaaggcaactatttgtgagaaaaaagagaaaaggcaaagatccactgtcatacttttgcttgtgggttccagtccaggctttctatggggggtgggggggtgtctcagtctccccgtctgtaaaatgggattagtggattaaatccgggaaggttggacaagcacctaggacggtgcctggtgccgtgttcagcagacgtcgattccctgtccaccccttctttaggagctgtgggaaacacttcataactccccagggtctggtgaacccttcctcccttttctgttccctgttttggcattggagatcataaaaaggctcttccatgtctcttgcttccttcctttcatcttctccaagagaaggaagtggccgcctttgttagcttgggttcagaagcttgtgtctgtcacccagggccgcccagccccggggtttgcgaaggtccggggtaggagggctgcagcctgcgcgacgcggcgggaggctacccgggggcgatgggaaggcgggcgcagtcgacccaagggtggagaagagggaaggcgaaggacgcgcgttcccgggctcgtgaccgccagcggcccggggaacccgctcccagacagactcggagagatggcaggcggaagacaccggcgcgtcgtgggcaccctccacctgctgctgctggtggccgccctgccctgggcatccaggggggtcagtccgagtgcctcagcctggccagaggagaaggtgaggggctgtttctgcgtagttgtacttgagcggctctggtccgatgcgaggacccctggccgggtcagccctacctaggcagagcgggaggcggggcagggccacggtccccagcccaggcaccggcgccccacccggcgcccggaggagtcggggctctgcatactcgccggggtgcctcggccagtccggggctgttctggagacgccaggggggctgggtgatgtcactggcctctcctgggctgcggtctgatgggggtgctgataggcacaggaaatgtgtctcgccggcggctgctgagccgggaggcgagggcgcatcgcggcgccaccccccactcgggaccctggagggcaacggggccggcgctccggggccgctagggtgcggggtgcgcctgggggtgtgcccacagcccccccgctgcttcatccaaggatgctgctggggcgctgaagtgtccctacagtctcaggacggatgtgtgttgtttgttttagatttttaaaaggagcaactcggcaggaaggacctttactggagacctgcttacttcaaaagcctttttcctccacttaaaagagggtacctgctattttcagagaaaatggatctagttgtaggtagaaatcgcatataaggaacttaggataaaagtgatttgcaagttccctctgtaagaagtgtatgggttcggccgggcggggtggctcacgcctgtaatcccagcactttgggaggccgaggcgggtggatcacgaggtcaggagatcgagaccat

SEQ ID NO: 50 - DNA, 6000 bp, Homo sapiens
gagtacactggcacgatctcggctcactgcaacctctgcctcctgggttcaagcgattctcctgcctcagcctcccgagcagctggaattacaggtgcctgccaccaagcccagctactttttgtatttttagtagaaatggggtttcaccatgttggccagtctggtctcgagctcctggcctcaagtgatccacctgcctcggcctccctaagtgctgggattacaggcttgagccaccgtgcctggccctcagtttccttatttgtaaaatggggacaatgaaaattatgccttgcaatgctggggatggtggctcatgcctgtaatcccagcactttgggaggccgaggcgggtggatcacttaattaaggtcaggagtttgagaccagtctggccaacatggcaaaaccccgtctctactaaaagtacaaaaattagccaggtgtggtggcacatgcctgtaatcccagctacttgagaggctgggacatgagaatcacttgaacctgggaggtggaggttgcagtgagatgagattgtgccactacacttcaacctgggcgacagagtgagactccgtctcaaaaaaaataaaaataaatataaataaataaataaataaatcaagccttgcaagaccatgatgaataaatatgattggatatgaaagcacccagctaggtgtctggcatgcagtgtgagagctcagtgaccggtcaagaatatggacagatgggaataataccaacagctagtgtctacagagcacttacaatccaagctcttaacatagactaatttatcaatgatcctattaaatattaataggtactaattttagatccatgtttacagacgagaaaatggtactaatttagatccatttttactgatgagaaaatgaagcacagagaggttaagtaagtatcctgagttagtaaataacagaagcaggattggaacccaggcagtctggccccagagtccatgtgcatagcagctcattctgctgctgaaattgcagaactttgggctgagacagtcagcgagcagcaccacagagttagaagtgggaggaggaaagtgtcatcaagggaggcttactggaggaaaacctgaccccctgtgtaggggcagtcataaacacaaaccacctggcttcccagactggaagagcgtgacaatccaaatgtcatgtcaggggtacatgaaaccataggataaacatggtacagtcactcactccataagctatttttttttttttttgagacagagtttcgctcttgttgtccaggctggagtgcaatggcgcaatctcggcttactgcaacctctgcctcccaggttcaagcgattctcctgcctcagcctcccaagtagctgggattgcaggcatgcaccaccatgcctggctaattttttgtatttttagtggagacggggtttctccatgttggtcaggctggtctcgaactcccgacctcaggtgatccatccgccttggcctcccaaaatcctgggattataggcgtgagccactgcgcccggcccactccataaatttttattgtgtaccatgagctgtcctctgagccaggaatatagccataaacaaaaccaaacaaaaaatccctgcccttatggcatttatgttctagtgggagaagacagacaataagcagataaataggtagatatgtatcagagggttgtaagtgttatgaagagagataaagtggagggtggagtgaaagatagcaacttgcaacgttgcatagggtggtatttggggagagcgctctgagaagatgacatttgagcaaagagccaaaggaagtaagggagtgggagttgcagaaattctgggggaagaatgttccagagagggggaagagcaaatgcaaaggccctgaggccacagtgtgcttcgcatatccaaggactagaaaggaggccagtgaagctggggtggagagcacaggggagaatggtaggagatgaggtcagaggggtgtgtgtgggaggagacaacatgtctccacccatcttaaagatttctgtgtgctataaaaacaagcctgagtaaagaatgtaaagcaggcatgcaattcaaaattcgaagaggagacttgactgctatgtggttagggggcctcccctgcataaacatcctctttccctttcacccactcccaggactgactgcccatccatgggagccatatgagggcggaacttgggaaactgtaggtgtgactgagactacgtctaagcacaggctctgggtctgagcctcttcctggggggcttcctgttgggtaggaggagcccaggagatcatcaccacctcagggctctgtggagaatgcccctggcttcctcctagctaagatctctgtttagtcaatgaagcctaaagggccctggtctgttcctccttccataccctggtgctgtgaggccagttggagcctgtgaagggcaagtcaccaccgggaatatttgctgcctctaactcaaattctttttttttgagatggatttcgctctgtcgcccaggctggagtacagtggcgtgatctcggctcacagccacctttgcctccccggttcaagcgattctcctgcctcagcctcccgagtagctaggattacaggcatgtgccaccacacccggctaatttttgtatttttagtaaagatggggtttcgccatgctggccaggctggtctcgaactcctgacctcaggtgatccactcgcctcggtctcccaacgtgttgggattacaggcatgagccactgtgcccggcctcaatttgatcaattctcaggtacattgagtttctgctgaattgttttttggcttagatctgctttgaactgattcaccatttggttcctttttggtagggcagagagggtggattctggaaggaaactttgcttcagttcatgattctatgaaaaattaacacggttcagtccagagtctagtcagtcacttcaggattttcatggttcaagcccccatctaaggggagcctcctggaatttatttatttattttcaacgaactagccgggcatagagagagtagaatatgatgccacattctagcctgcaggggtggtagggacagaataagtctcaatgcagttaacagccatactgacggagcagcacatatggtaaggcaagaatcagtaattagccccacccacttctagataatgaaactgaggcttaggggttttaaggacactgccttgtcagatttgaacttaaacagtcagactacagagcacgtgttcctgaccactgggatacactggctctttcacagagcctctgtgagaaaatttgagcaacttactttgggctggcagaggaagaaattgcaagtttcactgtattttcatgcctacgtacaatttgttcaaacattctggtatgtgctaggcaccgaggatatggagacaaacctcccatgtctgggcctcctggaactcactatttatcccaacctgggaagttgggaggagtagctgtgagtcaagtattatggaaagtcagaaaagggcacaagtaattgtttccagaggaggtgaaacttgccccaggcactcaacagcagcaaactaggaccaggtgcctacaatctcaaggcaagcacagctcttgccctcgggggcttaaatcccagggcagtttaactggtttgcggaccacctacttcagaattgtcctggtgcttgctaagatgtggatttctctttttcccagaggatctgggaaacacaaaaagcggggctgcgtgtagcacctaggtgattctgatgcacactcaaatttgacaggtgagccggggggaagaaatgggtgtgggcagtggggaacaagatggacaacgacttggaagtccttagtggcctgcaggcactgagattgcagttcaagatcttgagctttgggagttgttactctccaagggctagctcagagcctgaaacacagtaaggtttcataaatatttgtgaatatgcgcccggcgcggtggctcacgcctgtaatcccagcactttgggaggccgaggcgggcggatcacgaggtcaggagatcgagaccatcctgactaacacggtgaaaccccgtctctactaaaaatacaaaaattagccgggcgcggtggcgggtgcctgtagtcccagctacttgggaggctgaggcaggagaatggcgtgaacccggggcagagtttgcagtgagccgagatcgcgccactgcactccagcctaggcgatagagccagactccgtctcaaaaaaaaaaaaaaaaaaaatatatatatatatatatatatttgtgaatatgctggctgccaagatcgaaacgatcaggagcgtcaaagggaaaaacgaagtcagaggcagaagaaaaaggtgttccccaggcgatgaaaactttccagtaagttgtcttggaaaaggcaactccgcgtaatagagggacttggggaggtagccgctgcgggaaagggcgatgagtcctggggtgctgcagcgggggagtgggtaggaggcgcctcctagcttccccagggcggccgaggcatgaggtcacctggcacagcaacagcagcagctgcggaggacgcgcaggcgctgcggcgggaggcagtgtcaggctcgggcccctggggaattcctcccctcctttcccccccgcaccagtcccctagagaggcgtacccgggtcccgcccgccagagcctgagctttgtaccgcccaccaaggccacgccccctaccagctgtggggcgccgcagaggtcctttcttcggctccggagcggtccctccgccttccccgctcgaggccacgcccccgtgctcctgccgccttattttccccggagagtcccgaggcgccgcgccttggccctgcctacagcccgaggccccgcccccggcgcccctcccagccgtttgaagcggctcgggctgcggctggctcagagtggcgcggggggcgtggggcggtgctgaggagctgaagccgtggccagctcgacgccggacagtccagcgagcagcacggcgggaaccggcagccggagcagtcccggagcagaagcagcagcagcagcagcagccctcgccgttcgcggagcgcagccgagccggccatggcgttgtcgatgccgctgaatgggctgaaggaggaggacaaagagcccctcatcgagctcttcgtcaaggtgagcgctcgcctcgcggtcccgcccggcagatcccccggctccctcccggctgcggggagcggcgtcccggggctctcctgaggcgcccccgctcggcgccagcacccgtcccgctgcgggcacccgcgcccccggcccattgtctgggggccgcccgcgccttcccgcctccgagggcccgtcgaggggtccgggttggggacccgggcggcggccaccgtctccagcgcgtaggcatcggcggacgccagaccagcgtcccgcgcccgggtgggtcgggaagagcccacgggcgggacttgcctgccccggggccccagcgccgggcgcgcgcgggtcctgtcaccaccccccgcccgggcgccggggcccggccccacccgctccccagcgctccggtccgccgcccggagcccgaactgcggcccgccgcccgatgagctttcaaacgaacttctttgaacgcgtttttgaaaaagcatttgctccccactggtctgaaacggaaactttaattttcgatgcaatcttaaacaaatttaccaaagagcaggtgctcttggaccttcggaaaagaccgagattcccaacttgtgtttttctgtcttgggcatttactggctttctcgtttctcaagcgcggagtgttctgtatgatgcaacattttggcttctccccccggcgttgctgcttcgggaaggattgtgtgtgcccttttgttttgaaag

SEQ ID NO: 51 - DNA, 6000 bp, Homo sapiens
cctgaaatcccagcactttgggacgcctaggtgggtggatcacttgaggtcaggaatttgagaccagcctggaattagcccgggcgtggtggctcgtgcctgtaatcccagctactccagaggctgaggcaggagaatagcttagaacccaggaggcagagattgcagtgagccgagatcatgccattgcactccagcctgggtgacagagtgaaactctgtctccaaaaaaaaaaaaaagaataaacatctcctaaaacgtaagtatggataggaaggtctttgagggaggatttgagggaggaaaagctttagatttccaacaaattccaatgctttctgagtctctctgcacagaaaacaatgttttcccctagtaccccaacacttcggtgtctgtctccctacctaatggatttacctttgcttttccctatctggtagaataaaaccctctcaagtccaagctaccttcccaggaggtcctttgtgagggcagaaggagaagcataggtgcaggaggatacaggctttgggagacaggcagacctgggtgcaaatcttggacctgccacttatctagctatgtgaccttgggcaagcacattcacctttctgagccactgtctctctgtctataaaagggatcagcgggaaaatgtgtaagaaggcaaacaggacttggcaaacagaactcaatgaatgatgatggtggcggtggcgctgagtgcttctgagttagagagtagcccatcctggaggcctttgaaatccccacccctgtaaggactcatgccttagatcctgatgctcctcacattcctgacaacagcctcagcagggaccactcaactcacttggtaccacctatcccactcaacaggggctacatcacattacagcacataaaaataactgtttcccacaccattttccatcccttgtcccctttgactctcccagctgtgaggtagatggatggtattttcctcccaatttaatagaagagacagctgagacagagtgaaggtaggagaagtcagggcaaggattgagcctggtcttgattctgaatcccctgtgctttccttgtatcacctgaatctcaagcaatactttgggctccagactctctgaggggaggagaaggagaagggatgttctatgtgtgtgactgcaaagtcctcaccacaccttctaggcacttatgagcaaggagatacatattatgaaatgtggcatttgggaatgttctaagaccaccctaatgctattaagagtgccgggcgcggtggctcacacctgtaatcccagcactttgggagaccaagtcgggcggatcatgaggtcaggagttcgagaccagcctgaccaatatggtgaaaccctgtctctactaaaaatacaaaaattagccgggtgtggtggcgtgcgcctgtagtcccagctactcaggagactgagacagaagaatcgtttgaacccaggaggtggaggttgcggtgagccgagatcacaacactgcactccaccctgggcgacggagtgagactccatcccaaaaaaaaaaaagagagagagggcagagtggacagagagtcaaatgagaggaggtctgggttctggccataggccagctactgacatcccaagtaaacgtgagcaagtttctgaggtccccatgatccccatgtctgggacataaatgggaaaaagatgatagatagataataaatagaggctcagcttagacaaaaaggcatctgcaatccttgtcatcattactttgactttgaaatcaacaatttagagagcccactaccacgaaattaaaaaattctaaaattttttaaaaaacaaaacagtataacttaaagagttctgccaacttctcaaaaaaaaaaaaatcagagagcacaacattgaatttttttttcttttttttattttggcagaggaagattgagttcctggaaatgcttacaaaatgattcctgacactgggaggagatagttagaaaaaagaagaagaaaaattatacacatatatagataaaggaagaaggtggaaagaaagggaatagacaaaagaaaataaagaactaaaagagaaagaaaaaaaaagactttaaagggccccaattgaagcaacattatcaagttctcagcatctgcaattcacaagccgctcgcggttggggcgatgcagaccccgcccctttctcgggtgtccggcgctcattggtgggggaggcagtcgccggccggtgactgcccgaggaaaggttgcctgggacacgcatccctgtgtgaacgcatgacgtcccaccctggcgccaggctgtctggggctgagtcttagatcaacacagctgtgggaccgggacccacagctgggcaaaggagcggattcctcaacaaaaaataggattgtgagaaaagttctgaaacaaaaacagcgcagacaaaagccttaatgacatcctttcataaaaataaaaaatgcaagaggggggaaaaagctggtaaaaggagcagaactgggaacagaaagttcagaggcatttggaataagaggctgaggccccaccactgctaaacaagttgcagaaggcctgagctagcctgtccagtctgctgtggggaaaaagaagtctcttgggtttaaacactattcagtgttcctaaccataacctgcttctttcagaattagaatcttaggctagagaggaccattaaagggcacttgcttcctcccaacctacccactatcttttttttttttttttttttaaagagaaaatgaagcccaggaagggaggaaattcgtccaagggcacactgcaaattattggcatgcacagaacagaattttgcttgctaattccacagcatccttctgccttatgtcacacagcccatgggcatttcagcctggaagcatcctgggaaataataaatgcgaaggtgctttgcaaacctaaatcactatacaagcctgaggcatcagctgcagtagtagaggaaggaaaagaagggaggagaatctgggtagactgagcaccttccacacaactggcccatgctgggtcccccaggcagtaagaagactaagatcagatggagtgaacacatcaagtgctttgcagagaagaggcattcaataattatcgaatgaatgaatgagtagacccaattagttccattttatagatgggaaaatagaagcacccaggataactcagccaaagtctacacaattagtttaaacaaaaaaagaagaagaagaagaagaatgggcatttgcacagaaatctgcctggcccgtgatttttctagaaccctctggacttgaccgttttgccacagaagtctgcaagataggaaaagaaggatcttctcttcggttattcaggagttcctacagccattattttgcctttcctgaccaaatagctggcacttgacggctgtagcatgtaaagactgacttgcccactcacaggttttcttcctcttttcttactgaagagcctgtccttgaaaaaaacattccaggaagaaatctttcttgggccacagagccctgtggtttgatggaaaagaacgaggcttcaagactggctctgctattacttgtagtgtgacattgggcatgtcttaaatgccttccttgggcccctcagcatctttcacctacatatccaaatttcacacaaccttggacttctacaattggaaaggattttaaataatcacttagtaccatcgtctattttactcacaaggcaattaaagccagagtacctgggcttgttcaagattacatgacaaattattgtcagggctagcatgatgaacccagggctctcaattcccagtcagtgtccttttcaaccgttttgcgactctctttggctctgagcccccttgtcctgttaatcagtgccacacattatcgaactcttgtttcctgtgttaatcttgtctccccaaattgtgagattcttgaaagcaggagccactgttttatgcggagggactccataaatattcaccaatgattcattaggaaagcaactattgggggaatcccacttggtcatttccaaaatggaaagcagcatcttggaagtgcaggtccccaaatgtctagggaggtgacaagaaggcaagcaaagaatcaaagaatactgagcacagtgtcctgttgcaatacaggacttagtttgccggccctctggttcctttcctggtctttcagatggagctggagctacttcagcagggctaagaataatcaagtccaggtggcctgcccttccatagcagaaagggacagacaatagagcaatgaaattaccactgttttctacacagaggtgtgtggaaagtgaagagaggggaagttaagaaatttgctgacccaattgggtgggggggggctcttaaaaaggtttatgtagaaattgtcccatctgtgcctccatatttaaaaccttgtccaaaattctaattgaactcacaaagcacaactgtgcatatatttagttcgttatggagtttatggggcagagggtccaggctccttttttccccatgcaaaaagcatgggctcaagctttcttcttttcccctgttgctcaaataaatagtgttctttgctcaaaccccctttccctcctccttctgcaatctcagcgcctagcgcaaatctgttttcttcattgtaacctcagcttcaccgcaattaattttttttccctctggtcacaagataattcctgacgccagtgagtctggaggtcagacgaacagcaaattggggaacaaggcggcactaattccttacaagtttcccttgaaaaatctttcgcttaaaaaaaacggggggtggggggagcttctttgctgttcagggatttatgacctcggaggagctgtggctcgaaccagtgttgggctaaaggcggactggcagggggcagggaagctcaaagatctggggtgctgccaggaaaaagcaaattctggaagttaatggttttgagtgatttttaaatccttgctggcggagaggcccgcctctccccggtatcagcgcttcctcattctttgaatccgcggctccgcggtcttcggcgtcagaccagccggaggaagcctgtttgcaatttaagcgggctgtgaacgcccagggccggcgggggcagggccgaggcgggccattttgaataaagaggcgtgccttccaggcaggctctataagtgaccgccgcggcgagcgtgcgcgcgttgcaggtcactgtagcgggacttcttttggttttctttctctttggggcacctctggactcactccccagcatgaaggcgctgagcccggtgcgcggctgctacgaggcggtgtgctgcctgtcggaacgcagtctggccatcgcccggggccgagggaagggcccggcagctgaggagccgctgagcttgctggacgacatgaaccactgctactcccgcctgcgggaactggtacccggagtcccgagaggcactcagcttagccaggtggaaatcctacagcgcgtcatcgactacattctcgacctgcaggtagtcctggccgagccagcccctggaccccctgatggcccccaccttcccatccaggtaagcctcgaagtcgggacagggctgaacacccaggcaaggatgctgcgggaccctcggagctcccgattgcctcgcgtaactcttccctcttttcctctaatcagacagccgagctcactccggaacttgtcatctccaacgacaaaaggagcttttgccactgactcggccgtgtcctgacacctccaggtgagtatctcctctcttggagagggaggtttaaacggcaagtcctggagttggcagacgttttgaaaaattgccactcactcggtttagggaaactgaggccagagagggacaagtgacttgcccatggttgcatcaaa

SEQ ID NO: 52 - DNA, 6000 bp, Homo sapiens
aagcctgctacatatttactgaataatgtttccatattacattaaagactaatggaagatggttggtgactttttaaacttgtatttatatgtttcatactgagatgattttgaaatatggcctgttaagagtacttacattttgccttctcattctacatttgggatcgtggaggatactcttcagcaactaacacatctccagattccacgttattgttctcattttgcatcttctgaggcagtattgtcagcaaagtcgtccagatagatggccagtgttgctcctgttgtatgactgagactcactttaggcataagttgaccttagctttgtaactagtcaaaatgtttttttgtttgtttttgagacggagtctcactctttcaccaggctggagtgcagtggcgtgatcttggctcactacaatctccgccacccgggttcaagccattctcctgcctcaggctctggagtagctgggactataggcacgtgccaccatgcccggctaattttttttgtagttttagtacagacggggtttcaccatgttagccaggatggtctggtctcctgaccttgtgatccacccttctcagcctcccaaagtgctgggattacaggcatgagccaccacgcccagccagaaatgtatttttaattatattagttactgttgttggtaagggatatccctgagatgttattgcatagagaatgcatattctttaatcttttctctgtttgattgctgcttggatttttaatacctcttcttcttcacccttccttaattcccatgaaatatctgctcctttattctcaggctgacttataataatggcaccaatcaagcaagacaaagaaataaagggtattcaaataggaagagaggaagtcaaatggtctctgtttgcagatgacatgattgtctatttagaaaatcccattgtcttggccccaaatctccttaagctgataagcaacttcagcaaagtctcaggaaacaaaatcaatctgcaaaaatcacaagcattcctatacaccaataatagacggagagcaaaatcatgagtgaactcccattcacaattgctgcaaagagaataaaatacctagaaatacaacttacaagggatgtgaaggacctcttcaaggagaactacaaaccactgcgaaaggaaataagagaggatacaaacaaatggaaaaacatttcatgcccatggataagatgaatcaatatggtgaaaatggccatactacccagagtaatttatagattcagtgttatgcccaccaagctaccattgatttcttcacacaattagaaaaaaaaccactttaaatttcaatgggaaccaaaaaagagcctgtatagccaagacattcctaaacaaaaagaacaaagctggaggcatcatgctacctgacttcaaactatactacaagtctacagtaaccaaaacagcatggtactggtgccaaaataggtatacagacaaatagaacagaacagaagcctcagaaataatgccacacatctacaaccatctgatctttgacaaatctgacaaaaacaagcaataaggaaaggattccctatttaataaatggtgttgtgaaaactggctagccatatgcagaaaactgaaactggaccccttccttacaccttatacaaaaattaactcgagatggattaaagacttacatgtaagacctaagatcataaaaaccctagaggaaaacccaggcattaccattcaggacatagtcatgggcaaagccttcatgactaaaatactaaaagcaatggcaacaaatgtgaaaaatgacaaatggtatctaattaaactaaagagcttctgaacagcaaaagaaactatcatcagagtgaacaggcaacctacagaatgggagaaaatttttgcaatctgtccatctgacaaagggctaatatccagaatcaacaaggaatttaaacagatttacaagggaaaatcaaacaaccccatcaaaaagtaggcaaagaatataaacagacacttatcaaaagaagacatttatgtagccaacaaacatacaaaaaaaagctcatcatcactggtcattagagaaatgcaaatcaaaaccacaatgagacaccatctcacgccagttagaatggcgatcattaaaaagtcagaaaacaacagatgctggagaggatgtggaggaataggaatgcttttatactgttggtggaagtgtaaattagttcaaccattgtggaagacagggtggtgattcctcaaggatctagaaccagaaataccatttgacccagccatcccattactgggtatatacccaaaggattataaaccattctactataaagacacatgcacatgtatgtttattgcagcactattcacaatagcaaagacttggaacccacccaaatgcccatcaacgatagactggataaagaaaatgtggcacatatacaccatggaatactatgcagccataaaaacggatgagttcatgttctttgcagggacatggatgaagctggaaaccatcattttcagcaaactaacacaggaacagaaaaccaaacaccacatgttctcactcataagtggaagttcaacaatgaaaacacatggacacagggaggggaacatcacacaccagagcctgttggggggtgaggggctacgggagggatagcattaggagaaatacgtaatgtagatgaccggttgatgggtgcagcaaaccaccgcggcacgtgtatacctatgtaacaaacctgcaagttctgcacaggtatcccataacttaaagtatatttaaataataataataatggcaccaaatctatatctactcagtttgtatagctgagtgacactaaaccttgtttgttttcctgtacattcattatggcttattcattaaaagattactaatatttattaatcacagccaaatactacacctatatgtacctcattctagagcaatccagtggagagggtattcttttccttctcagttttccagaagaggaaactaaggcttagaggttaaatgacttgcctgagttacaaagttactaagtatttgacctgggttttgaacccaaagatttacctccggttcttttatgctctcagtttacactacacaattttacttgctgacatgcaagctattttaactctttgcccctctctttcttaactttctgtatatagtagacctttaatatatacttgtttcatcattccctgggccattattattattattattatcattatagatgggtgacagtatttgtggtttgttctgtctactgaattttgttctctcaacttacactgaagcgagcctaggtagaaggggctgatggtgcagaaagaaaaacgtgggtaactgagggtcagaaggaaaaccctattttgagatgtgttagaggttcgaggggaaggggagcattttaggacttcatcattttgttacttgagactaaactgctttaggaatcttctggacatcatgctgataatgccctaaccacccccccaaccccgatcctccccctacccatcattctactcagctggtgcaaaagattctcactgtgtataggagtaaagagaaaggaaaatcagcagttttccttggctatagttctacattctgaggtaacgctaaacccaagtaactgcagatgggagacttacagaccttcctcccccaccctcgtgtgtatgtgtgtgtgcgtgtgtgtgagtaagcgcgcgtctttggatgggctcctatgagcctgggagtctatagagcgccgcgcggtagatcagcagtatgttcatggtgctgggctttacctgttcctaacctagaaactcccttggtcggtgaaggaactcggctttcttttcctgtttatcatccatcccagaggagctgtcggattccccccttttaaagccctcccgcctccacacttcccccggagtcatccccacaaactacccccagatgaccctctgaccaaggtgggggaggggaaaggttatcagaaggtaagtgggtcaagagtgcagcacggaacaggaccctgaggagcccccagggctgccggggtcgcaagcctgtggagctacttccgccgcctgccgccaactctgcgggccggcgacccctcctctccgcagacaccggccgggtctagctcgtgcggtccgcgctcaactccacccgcagccgccgcgggctcctcgggcgccaggagcttgacccgccacagcaaagcgctggcagcgggcaaggtcgctgactcaggagacttcggagtgtaggctgtctagttcagtggttaggaacgctggctctgaagtccaatcctggtttcacctcatgccatctgagtgaccttgggcgagcttcttgacttcagtgagacaatttctgaatctataaaatggggacactgaagtgatagctaaacgctagaactgttgtcagaattaatgaatgcagcgctctggcacgaagtaggaactcacttaatagtgaccatgattggcagcagcagtgagaggctaagcattggggtccagaatagagatttgagctctggcctttccagttcttcacccagggtggggttgggggaggggtagcgggaacgtctactcttcccgcctcttccccagttccaagataaactcaggagtacccggagagccgctggtgtggactccggttccttcggacggccttgtgtccccagactcgtagcacctcacgccgcccgtggctcctctctttccctggagcggagggaagacttcttttgtgaattgagtatctccctcccccaatttccccaccccaagcttgctgcctcctccgggtcccggcggccacggcgaggcggcctgagcttcaggaggaagggaagaggcagcctctgggtgtgcgagtcccctgggcgcggggaagggaagaagaggacgaggtggcgcggagaccgcgggagaacacagtgcctccggaggtgaggggctcttcctcattttgcctgccttctagggaccgctccggcttcttgtatccagaggtacagcccctgaacagccgggagtccccgtcccctgtcccggacgaggggccgggggcgccagctccgcacgccgcgggagtgggcggcgagcgcgggcctgcgaggtaaggagggatggcggcgggtggggagtgcgcctgcacgtgtgtgcgcgcgggtgcgcgcagcggagggggcgctgggggaccggccggggcgcgtcccacccggccacctgcccttcctgctctgtgcggtcgcccacgccctccagtcccccgcacctgcgctagggcgcccgtcacccgcatccctcacgcctccacgtcccatctccccctcatgcaaaccccaccctgcccactaataattcccactgcagaatcagaccgaaacctggagagacagcattgcctttctgctcccctcgcccccctcccctcctgctataaataacccggactagcgggtcaggaacgtcacacggcgagaaaacaggaccccgaggttttcttctctgggaatagggggcaaagggtgaggagaggagaaagaaatcgctcgtgagtagtgaagaaaagcttgctctttgactactagaagagaccagccattattttattcttttctttctctttcttccttttttatttttccgtgcctttcttattctgtacccgcctccccaaccccccgccccaaatccaacgggttgctcagcattcctcccattggttttttccctccctcccgcttcgactcccaacgccccctcccccctcctcccacccgctgcacaacccccgccccccccatcccagtctcgccccaggcagggcatgctatttgccaaggaaataaagttcaaactccttgccccgtgtccggc

SEQ ID NO: 53 - DNA, 6000 bp, Homo sapiens
gccctgaatcccagaggaattccttaacaggcctgaaagtagcagtggctgggtctgctggtgggagttggagggaacttaagggtccctcatgggggatgggatgaagtcacactggggaaaccaaggcagcagtcaggagccactcactaggaaggggctgccagacagatctgaaaaatatagaactcagtggaaaagaggaaaaatggaaggaggctgtagcacccaccacctacctatattaaaaactcacaaaggcgcaggactcaggagcccactctctggctccagtctgtagtcaaatgcctgctagctgtgagacctggagccagttcctttagctttctgtgccttgatttcctcaaatataaggaggacgtggtttgagcacctatctcaaaggtgcttagcacatagtatgtactccatatgtgattattgaatgaacaacctcacagtgtttacaaggacacgtgcagacaaatcatccaagttcagggatgcagatcctgttgtcagtggggagcagaggagaggcatggggaattaggatcaagggagaacattggtaaattaagtttagaggggaccctgttcagagagggaccctgttcagagagggaccctgtgtagccttggcagcatgccatgaaccctctgcagcaccggtaccaataaatcaccattgacaatgaaaataagtcaccctgtgtgatgcctatgggcccgactcctggagaaaaggcagaagatcacccccaggacctgcaacctgcacactcttacctgggctcagccaggatgacggccacctccgtctttcatttacgccttgatgctccctccataagtggttcctggagacctgaaatgggcttcatcttcctctcagcaccttgagggagcagagtttggctcttgaggagcatgtgtggacacatttgtcttctcctccaagtatttcctccttcctcccttcattcttcaacccatacatcccttcaccacctcactcatctacttcttcattggttcatttggtcattcactaaaaaatatgtctcaagtaccctctgcatgccaggctctgtgctgatgctgtggacacagtatagataagaagatgtgggcctggtctcacccttggacctcaaaatctatgtgggaaatgatcaatactcaataaacaaacaatggcacacagggctagaaccatgaaggaagaaagtgggtgactgagctacagaccagcccggagggcctatttagacgaagtgattaggacagggggacatccttgcggaagactgtccctggaagtcctgggaaatgggacattccaaacagtggtatgatctccccatacttgagtgcctccatccctctgcccatccgtccatcatctactgaattcattcattccttacttattcatttatttgttcaacacatgaggaagctggctctacttggggaaaaaaattgtttgaagctgcacagatctgtgttcagatcacaattttgccatgtactagccgaatggcagggaaatgttacttatctctccatgcctccatttcctcatctgtcgaatggggataataatgtctaatgggagactggttgtgagaatgaattgagatgaggatttggtgagatggtgtcacctggaacacagcaactattgttctggtccactggccagacacttagtgtttgcccggctcttgtggggatggacacacaacaacccaatcgtagcagcctaggctgcggcccatactggctcctctaatcaggaaagtggggacataccaattatccccttttggcctcctgaggaccctatctggtagacactaacatcatttctttaaacaagcaaaactgaggcacagagaggttgttgattgtccgaggcccccagtaaatggaagagctgggggacaccttggcattctgcctccaaatctaccatcctggccaggtcactgggccgtttgttttcagtttcactgacattgaagaatggcaggtgcccatgaggctcaccgggtcatgtgaggtttcacccacaggtggaatggtcagcactttgatcatgttttggggtgcctgcttcaattgctcgagacaattggatttcctaaaaatgatggtggagttcaatggcttccagctctgcaggctcttgttacacttaacattgagaggctttggcaggtcaagctggcttggaaatgtctggtcctgactctgtgccttgtctgaggttaagagactttagtttcagcctcagatctactactcatacgtgtgctctgaaaccatctagcatctctgagatgtgttccacctatttcataacactgtctgccttgtagtcatgagatgctctacagcacagagcccgttcatacttagtgttcatcaaaagccaagtgagcctagattggcccctaacaccttgggttatttattaatgacacctgtcaacaatgctggcctcctaggatttattttttgctttgtttgtttgcttgttttgttttgttttttgagacagtcttgctctgtcacccaggttgcagtgcagtggcgcgatctcggctcactgcaacctctgcctccagggttcacgccattctcctgcctcagcctcccgagtacctgggactacaggtgcccgccaccatgcctggctaattttttatatttttagtagagacggggtttcactgtgttagccagggtggtctcgatctcctgaccttgtgatctgcccgcctcggcctcccagagtgctgggattacaggtgtgagccaccgtgcccagcctgggatttgtttttaagcatcaataaattaatgagaagaaaatgactgacatttattgggcagtccttacatgccccccacataccctgccctttaattttacatatatgattttagtaatcctcatgtatcaattagtatacaacttgactccaacaaaagaaaattcagactaactacagtttaaacaataaaatattaaattatttcatgtaatgagaagtctgaatggtggctccaacaacaacatgaagtcccaacgactcagaccttttttttgcttccactctgccatcctcaatttgttgactttttattctcagcctcatatacccaaaatggctgctgcagctccaaccatcacatttgcacacaaggaaagaaaagaatgagtagatggtcattctcttcctgaggaagggaatcttttctagaagaccctagcaggtttcccttatgtctcattggccggaattggatcagaggcacatccccaggtcagtaaatggagaaatcatgagcaccatctcttctggggtcatgtctatagggatcataaacctcttccatgaacacaagcctgctgctacctccaagcagccacacatgcttcagcatcccttgttaataagctacaggaaaagagaagagaaggagtaactgtcatttaaacctcagtgtcgagtattcctactgagacctggagatgctgagaacttgccaaggtgtgagaggagttgcaaggaggccattgtggttgggcatggtgcacgaaagggagagaggaagaagtgtacagggagctggctggcccaggggccacgccaggactggggactctgtgctgtgtgatgggcaggctttggacagttgtatccagaagatgatctatacatgacgctagttcaaggattgctctgagatgtgtggatggtagaaggtgggcagggaggctgggtatcagtcaggaggctgtggcagcggtccccatggggagcacagggctggactaggacagcccatagaagacatcccatctcctttcttgcccaaggaagagactcagtggcagcagtgcaataagggtacaggccaggaaacccaaccccccagggatagcaagcatccagagacacgtggggacagctccagcaccaaacggcttctgaccaatgagcagagacggcaaacagcaaatgcgttaccgtggctttcacgtgtcatgaaggtgatgctgtaacctgagcctcagagctcattttatttgtgaattcctatcatctctagatgggtggactgaaagccacctctttcgcttgcagctaggtagaggggagtgcaagagggcaaatgaaaaccagaagtagggttgggcgcaatgcctcacgcctgtaatcccagcactttgggaggctgatgtgggcggattacctgaggtcaggagtttgagaccagcctggccaacatggtgaaacctcgtctctactaaaaatacaaaaatcagctgggtgtggtggcacatgcctgtaatctcagctattcaggaggctgaggcaggagaattgcttgagcctgggagacagaggttgcagtgagcagagatcgcgccactgcactccagcctggccgacagagcgagactctgtctcaaaaaaaaaaaaaaaaaaaaaaaaaaagaaaagaaaagaaaaagaaaaagaaaaggaaaaagaaaaccagaagtaggagcagcctgaagaaatgacagggagttgatttcccactgggagccctctcaaagcccacacacccgcctgcctggggtaacagtatctcctcggacatcctgcaccctcccatgctcccccctccctacagtagtgaaagacctaggcaggatgaccccagctcctctgtgagaatttcacaccctagtgtgaagtcatagccttgtaactttccctttaagaactgtcagagctggggaggctggccaagctcaggctggaggtggggacagagggaagaaagaaaaaaaaaaaagagagagaggcaggaaaagttttttcagaggaaaatgcagggtttgtccttcaccctgacgtcagatcttgctttaataaaaccccccaagggctgcggaagaggcatatctggtgctcctgatgggccggccagtctgggcccagctcccccgagaggtggtcggatcctctgggctgctcggtcgatgcctgtgccactgacgtccaggcatgaggtggttcctgccctggacgctggcagcagtgacagcagcagccgccagcaccgtcctggccacggtgagtcctgcctggaggggctcagagggagacccagctcccttctctactgggtcctgctacatgggggctggtgggcaggatgaaaagggccaggaaggtttggggctggaaggtggccacttacagggcaaggacagagcccagggtgaggagtcagctgcccaggttggctgaagctggcagggtgaggaggacggtgcgacacttggggaaacaaactgcacaggtccagcctgccctctctccccacctgaaacagtgcagaaagaacggggccctcagcagaactgggagtcaggggcccgggctccagacccgtcttcgcctaacctggctgtgtggcctcgggtgggtcactcaccctccaggagcagcgtaaagcgacgaagttgttaggtgacttctagagtctctgagtttgaaaactccaagactccaagcattggagatgctgcgaagatgggagatggaaaaagccaaaaaaaattggaaagaaaaatgccagctttcaacaaaagctccttattgagcaaacagtgctcagggtgatgtctaaccccaactgctgtcacctccggtctgcacagccctctgcagtctgcagagtgtccatacttgggtcctgcctatgaagcctgctgttccagggtgggggtgatgtgggcaccccagagtctctctctcttccacctgcaccccagggtacaccaaggggaagggacaaaggtctgcacctccaaaagccaggggagtcacatatgtgaccgtgtagagccagcctgctagggccaggcatggtgaggaaaaggcagaggcaggcagtgcaaggagggcaggaggtgggtacctggca

SEQ ID NO: 54 - DNA, 6000 bp, Homo sapiens
ctaacctaatcatgggagccctttaaaagcagagagttttctttggctagtggtagaaaaggcagtcagacaggtttaaggcacgaggcagacttggcttgagggaggttttcccttgctgggttggagggggctagggggcagccactaggagcagagattggccccctggctgacagcaggaaagaaaatgaggacctcagtcctatggcaaggacctggattctgccaacaacctggattaccttggaagcagattcttcccctaagcctccagacaagaggccagcccagccaacaccttgcctttgactttgacagaccctacgcagagaacccagttgactccagctagatttctaacttacagaaatatgagataataaatatatgttattttaaactgctaagtttataataatttgttgtgtagcaatagaaaactaatgaggcacccatctctggagagaagttttacccctattttttaagtgatgaggtccagggaggtatggttgcttggccaagattgcacagcacatgagtgacaggctgagctacagcctagggcaggggccagcaaacattttttgtaaaggtttagatagcaaatatttaggctttgtgagctatacagtttctgtcataactatttccttctaacatcgtagcacaaaagtagtatgtaaagaatgagcacaactgtgttccaataaaactttttagaggctacattttgaatttcataaaattctgtatgtaatgaaatattcttatttatttatttatttttgcgacaaagtctcgctctgttgcccaggctggagggcagtggcatgatcttggccactgcaacctctgcctcccaggttcaagtgattctcctgcctcagcccccgagtagctgggattacagttgcccaccaccacacttggctaatttttgtatttttagtagagatggggtttcaccatgttggccaggatggtcatgaactcctgaccttaagtgatccatcctcctcagtctcccagagtgctgggattatagtcatgagccatcacgcccggccatgaaatactctttattttcttcaaccattaaaaagatgtggaaactattattcttagttggcaggctgtataaaaacgggcagtgagccaggtctggtctatgagccacagtttgccagcactccccaggtgcccgactcctagcccagggtgtcagtgattatcaatagggctaaggggtggtacaaagcgtgctggacaccaaggctctgtgtctaggtccctgttgtacttcagatttgctacgtgacttcaggcaactcactttccttttctgggcctataaatcaaagcagggtaatggcattcaaatcttttccctacgcacccccctacccccagggacttttccaaagcaaagctaatacagaactctagcttcaaaagctgacctaaagggcacctgctctgactggccggggaatgtggttggggtccctgtccacttcctctcgttccactcccaggagctccagagtctctgtagaacacagtgtgcaaacctttgaaccagccagtctctaaaacctaactaaggcagtctaaaccagggattctcaacccggtgcttgacatctgggactggataattctttgttgggggtgctgtcctgtcctgtgcattgtaggttgctactagaagctgtttgagatggggtctttgtcactcaggctggagtgcagtggtgtgatctcggctcactgcaacctctgcctcccaggttcagggaattctcctgcctcagcctcccaagtagctggtattacaggtgcccgccacgaagcctggctaatttttgtatttttagtgaaggcagggtttcaccatgttggccaggctggtctcaaattcctgacctcaggtgatctgccctcaggtgatctcggcttcccggagtgctgggattacaggcttgagccactgtgcctggcctgatttcttttaacttactgacattttctgatttttctgcaatgtccagcaatttcttttcactgaaaaaaaaaaaaaaaaaaagaagaagaaggcaggcatgcagttttgtttttgtcagtgtgctcaggcctaggatggatggacctgtaaatccctttggaagcctggaagagggaccagattatactactttgggacactgagaagtcacctagaaaaggtgacctgtaacctgagttttaagggaagtgcatgagctcaccaggtgaggaaagggcctttgtgaccaaggtgtggcattgtccctgggacacagtgaacagtgagttcaggcatgatatggtagggagcacaggaagtgaagctgggaggtggccagggatttggttacaagactgtggatgcttggagctggggttgttattctgagggcagtgggggagccattgaaaggtttggcaggtgagagactgatggggatgctggtctggaagctcaagctggtgtctcatgaagggcagtcagcttgggggcagagaggccagtgagaggcaggagcaggaacacaggctgtaacaaagaggggacaatgtggcaaaaactggagaagtgcatacgggtctggaagattcagactgacatggatttcagcacctcctctccccaatccccacttattagctgtgagccctgggcaatgcacttctctctgagcctccatgacttagctgaggtgacaacgaaatgggaagagtatgtggctggtgacatgtgataagtgggtacaaatggtagctcccttccctacccgcttgaggcagaagctgatggccagttttcttctgagtcgcccagccgagccagggaaattctgagtgtgcttgtttagagagggtcaccaccatgcctgggcagcatcgcagatctgacgctgggaccagtttctgaaaggtggggaagaagacagagccagaaaacctgggttagattcctggatttcaattagcacccaggcccagccccttctggtcccagctgtactgcatccggctgggtcctgagccaagtgacacctggtccctgcactcaggaggtccccataaactaggggagattcacaaatagagccattgtgtcatgtgaggacataccctggccagctcctcaggctaaggtcttactaaaccccaatagctattctaggaaggaggtgccattgtctctattttacagataaagatgtggccagtcttctggtctgaaagtggctaaggcaggaaggaaccgtgacttgtccagttccagggcctgagcttccagcctggcccagggattcaggttgaagcagggcccgaggggtgtgctagcaacatcagcctgtccaggcctggaccccaacatcagcaacctgtgactcacttctgggactacacaggcagggctgggagggtccattttgaccagtgaggggcccacaacacacacagatgcctgccctgtggaaatgagtggagccaaaagctctgtggcctccagcttcccattcatatctcccctgtgcctacaagggtgcaaagagggctgccagcggccttggtcccacctacagactgaaagtcaaaggaagtctgcctggtccttgtctcggctctgtagccttgcacacacaggcctgtgcccttctctgagccttagtttcctggtgggatatttcttcagagacagagtttgggggcccagggccctgccgctgacctgctctgtgacttggagccagtggcttcctctctctgggcttcagatccctgccggccaggctgctccaccttctatccttgggctgggaagagagttagtcacccccagctcactggggaatctaggccatgccagtggcaagctggccccagtcccccggcttgctggagtagcaggaaagggcaagaacaaaacccagaccccagctggttctggaaatggcttcccttggcccacatgaacttgtcaggatctcaccagcctgtgacttcacctacatgctgctccttctgcctggatgctgttgtccactcctactctcctaaggcacctcagatgtcctctcacggaaagattcttacacacacgcacacacacacgcacacacgcgcgcgcacgtaacccttcctccaggctcccaaatcacctgtccacaaaaactgccttcagtagccacttaacctgcatgcttaaggcattcaatcctcacagaactgtgagttagggattatcagttctccttgagggaggaaggttcagagaagttaggtgacacatcttcagtccctctccggggcctccactggctggggcagtgacgccggtaacggggagcactttaatgctggtcattatcgctgagaacgccttcctccccaggaactagggtcctggagggacgggagggcttgctgtctgactgctgtgaaaaagcaggttcggtcaacgcagtctgcagcaaacacctcggcaagtgactttcccctgtctgggcctcagtttccctttctataaaatgggggtgaacaggactgggctcgggactcctaagccctgtccggctgagccttaacggctcggaggagtttgtctccatttccaagcccgccctggagcgctcgcgggggcgtgacggcccccaggacccaaggttccgatccgcgccaaggcgttccggtcagcagcagccccgcggctcctcgggccccgccgcgctggcaagccccagtccccgccagcccaatcgtgctggcgctttaaggacgggcggggcgggctgggcgacagcgctggacacctggagctgcccgaggacgcggaggagaggtggggcgggcgtcaccaccggagtggagggcgaggcccgggtcccgcgctcccctgggcgccccacggcagcctcagagccccgcggggagcgcgcagccctcggggcgggcgccggggtgaggcctggctcggtccctgcgcaccgggtgcgggcggcggagagggcgcggctggtgagccctgggagggcccaggagccagacctcggttttgcgggctggggagcagggctcgggggcagcggccaggcccctccgcccctaacacccgcgcctcctgcagacccgagggtcgccgctggtagggtcgctcagccctggcgtcctccaccaccacaccttcacctgcgcccggctccctgcgcgcctggacagcgcctgctgcccgcctcccgatggccctgccccaggtgggtggaaacggccttctccctcctttacgggcactcagccccttctgtcgtcgaccttgccccgaccccttcccctaacctcggtcaccgtggcttggtgggcagtgtggacacccggggctctgcctgggttttatcttgctgggtggcttgaggccatggcactcagggcctcaattggggaacaagaacaaattcttgttcggacagtttcgtctttacagaaagcggcatctaaagtgcccttattggggcctggtgcggtggctcacgcctgtaatcccagcactttgggaggccgaggcgggctgataacttgaggtcaggagttcgagaccagcctgggcaacatgatgaaaccctgtctctactaaaaatacaaaaattagccgggcatggtggcgggcgcttgtaatcctagctgcttaggaagctgaggcaggagaatcacttgaactcaggaggcagagggtgcaatgagccgagatcgcaggactgccctccagcctgggcaacagagcaagatggaatctcaaacaaaacaaaacaaaacaaaaatgcccttattggtatggagtagggcacggagaatggcatggcgttccatcctggctttgtgcaggagtgggtgcaggagggaggctctgtcctccggactctcctgacaggagcagggcctttctactagacttttactgaagatgctgcc

SEQ ID NO: 55 - DNA, 6000 bp, Homo sapiens
ggccaggagttcaagaccttggtgttcaagcccatagtgaaaccctgtctccactaaaattacaaaaattagccggggtggtggtgcgcacctgtagtcccaggtactcaggaggctgaggcatgagaattgattgaacctgggaggtagaggttgcagtgagctgagatagtgtcatagcactccagcctgggtgacagagcgagactctgtctcaaaaacaaaaaacaagcaattccatttataatatcatcaaaaagaataaaataggctgggtgtggtggttcatgcctataatcccagcactttgagaggccaaggcggtgggatcacttgagcccaggagtttgagaccagtctaggcaacatagtgagaccctagctctattttcaaatatgaaaaaaagaaaaattttttgagataaagtctggctctatcgcccaggctggaatacagtggcgcaatcttgactcactgcaacctctacctcctggactcaagccatcccctcccacctcagcctcctgagtagctgggactataggcaccaccacaatgtctggttaatttttttttttttttttgtagagacaaggtttcaccatgttgtccaggcctggtgcagtagtttgcacttcccttgaggctaggagttggagaccagcctggccaacatagtgagactcctgtctattaaaagaaaaaaaaaggctgggtggcacatgccagtagtcccagctactcaggacgctgaggtaggaggattgcttaagaccaggagttcaaggttgcaatgcactgtggtcacatctgtgaatagccactgcactccagcctgggtgacagagcaagaccccatctctaaaataagtaaataaataaatatatttccttaatgtagtagccaaaaaagaaaatcattttaatttgcattttttgattactagtgagatggaagattttcaaatgtcaaacatttgtatttcctttgtgtgtgtgaaccatcagttcatactttatacctatgcatgtgtggcaggcattaattttccctattgatttgtatgagcccttcatatattatggtatttctcctttaactatcagtatttgttccaaattctccaattggtgtttcttttttaattctgtgtccattcaacaaatatttattcaatgtttactatgctctcggttgtatggtaggaattctatgttattctttacacatagaattacacactttttagttcttccattgtttagtttagaaaaactgcacttaggggccgggcacagtggctcacgcctgtaatcccagcactttgggaggccaaggcaggcggatcacctgagatcaagagttcgagaccagcgtggccaacacggtgaaaccccatctctactaaaaatacaaaaattagccaggtgtggtggtatgcacctgtaatcccggctactagggaggctgaggcaggaaatcgtttgaatccaggaggcggaggttgcagtgagccaagattgcaccactgcactccagcctgggcaacagagcaagactcaaaaaaaaaaaaaacagcctggcgcagtggctcatgcctgcaatccaagcactttgtggggccgaggcgggtggatcacctgaggtcaggagtttgagaccagcctcaacatggagaaaccctgtccctactaaaaaatacaaaattagccgggcgtggtggtacatgcctgtaatcccagctactggggaggctgaggcaggagaattgcttgaacctgggaggcggaggttgtggtgagctgagatcacaccattgcactccagcctgggcaacaagagcaaaactccgactcaaaaacaaaaacaaaaacaaacaacaaaaaagggagaaaaaactgctcttaaagatcagaacaaaaaagcatataatatcccatatcagtgtctgtgggtaagagctagcctattctagctctcaaaaacttgcaatcaaatgttgggcagggatgcagtcatctgaatgcttgattagggctgcaggatcaatcaagttagttcactcacatggctggcaagttggtgctggctgttggtggaggctttttctcctctccacataggcctcttcatagagctgttcgagcacagtggtgtggagactgccttcctccagggcaagcaatcaaagagaatgagagggaaagctgcaatcagtgtctttgtgacctaacctcagaagtcacacacattcaattgtattctattggtaaaacatagtagtcctgattcaaagggttgatgcagaccaccagcggtgacaatcactgggggtcctcttagaggctggctaccaaggatcccaacatcttttttgtttgtttgtttctgagacaaggtattgctatgttgcccaggttggagtgcagtggctattcaaagcctctaactcctgggttcaggcaattctcctgtctctgcctcctgagtagctgggactacaggcatacagcacctcgccaggctaatcctaacatcttggttttcctgtaatttactttataaagcaagtactgggtgtgcacagtgacccatgcctgtaaccccaacactttgggaggctgaaacaggaggatcacttcagaccaggagttcaagaccagtctcaacaatatagcaagatcctataacaaattaaaaaaaaaagtagctcactgtggtggcatgtgtctgtagtcttagttattcaggaggctaaaatgggaggatcacttcagcccaggagtttgaggctgtagtgagctatgattgcaccactgcattccagcctgtgcaacagagcaagaccctatctcaaaaaaaaaaaaaaaaaggccaggcgcggtggctcacgcctgtaatcccagcactttgggaggccgagacgggcggatcacgaggtcaggagcttgagaccatcctggctaacatggtgaaaccccgtctctactaaaaatacaaaaaattagccaggcgtggtggcggcgggtgcctgtagtcccagctactcgggaggctgaggtaggagaatggcgtgaacccaggaggcggagcttgcagtgagccgagatcgagccactgcactccagcctgggcaacagagcaagactccatctcaaaaacaaacaaaaacaacaacaacaaaaacaacaacaacaaaaccaagtactgagaattttgcaacaaccagtacaattctagttttgtaccatactgttctcttaaacacagctgtgttctcaaacacatacgtgcccatgggtgcactcaagcataacagattttgtttggagttgcacaaattaaagaccctttggtacagtgtcagctcattagggcaccagattccatctcaaactctgaatttgagtaagcagagttcaaggttgcagattaagggccaaaatctttattctttgtatctactttgcaattagttaactgggaaacacttcaagttttaccagaaacctttaattttctagaaacctttacctgtgttcaatatccactttaattaaaaagctcttgtaaatgatacttatttggggaaggtgattcagcttgtcgaggggtaattaaccaaattgctgaggtggaagtctgggtaagtgaaaaggtcatcaaatctgagtaagaaagcttgcagctttcacctctccgtcaagactggcagagaggcactttcgtaaaatctttgtttgggattcacttttacttcgccacttgtcccattttaattaaagcttgccaactgaaggacctaagaaaacaatatagttctgcattttgccaaattgggaaatttccagggcccccaaaatttagcggggagactcagagactagaatgggagaataggaagcaccaacttgctctaaaaggaagattgggtaaaagcagcactcttattccagctctacaaccaaagcaactaagacttgggctggctggctgcctagccacagcattccctcctacttccccattatctcctgaccagcaagtcatctttggtcacatatctttaattatttagtttgagacaaagtctcactatcacccaggctggagtgcagtggcgcgatctcggctcactgcaacctccgcctcccgggttcaagcgattcttccacctcagcctcccgagtagctgggactacaagcgggcaccaccatgcccggctaatttttgtgtttttagtggagatggggtttcaccatgtcggccaggctggtctcggactcctgacctcaagtgatccgcccacctctgcctcctgaagtgctgggattacaggcatgagtcaccaagcccgactacatattccttttattaatattcctgttgaacttaattttggtcgtttccggtgcaaaaatgttaaggtaaagggaatcaataacagccacatttgatgtatttttgtaatccccatctccaatttccatccgggcctgagtaaccaaaaacactttacaggggtagactgtctcaacagacatcaatttgtaaccgcgtctacctctaccacggtattctaaagactccgtcgaggaaaacctttagctcgggcaacgggagacacattacagaacactgtccgccgccgaagaaacagacgatacgcgggagagttgaacagacacccggcctcgccccgattgcttcacagtcctcagccacgcccctcccaaccggaactacatcccccgcactccgcgcccccacgcacagcgtgtcgtaggcgtccgaagccgcaggctcccgcccggcttcccgggacgcacagggcaggcgctgggcatgcgcatgctcggcaggcggggcagctggagtctccaggcgctgcaatctgttgcgccgccgcccgcgggagccggcagatccgggtcttgtggctaagagtgacgtggtcactcgaatcaaaacagaggagggggaggaagccggcggccagaaacggcagtggcagcagcgtccggagcagccgcagccttctggaagctccaggcggtctttctgccgagcctcggtcccggcccccatcctccccgccccatcggttgttgtctgggcgggtgagtgtctccccctctcccaccagcgtttgctggctcaccctcccctcgccccagtttttcctgggggctcctcaggctctcggggactgcggcggctgcggcagaacagggctgtttctcgggcttggcgtttcctcggccgggctggcgattctgcaccgggagaagctccgctgctgccgagcccgcgtcccccgcgaagagcctgcaattgggtattctctgcaggatgtcagagtcggggctttgcaggcaagggcaaggtagccacgggtggttttatttttaggatcagattgtcgacgggtggaggcgtatcatggagtaaaaagagagtcgtagctggaaggaaaaactcacaaatcctgaaatccacactatcttgtttaccgtctccctcagccctttctgggtacggtgaagtcactaggatgcgtcctttgttgtgataagtgagacgagaaagctgacaccctgaaagcgagagctttttagctcctattgtgtcgcgaatttaaaggatcccctttttctgtttgctcagtaagtggaaccaaggctgacagtaaagaggtagcagcaccctttattggaactaatagtgtgtgataaactggttaccggctctacccgaagtcccgtgttgctgtttaaaggcagacttcaccaaagtggctgtttatatgtgccaggattttagccgagatggtttgctagctgtagagagtcggtaggatgttttcagttgccccagttggcaaaaccgaggctgtggccttaatagaatgtgttacttttgcatcgagagagtcggatgagcttcacacacgtaatagctacatttgcagaagagaccttccagtttgtgtgtgtt

SEQ ID NO: 56 - DNA, 6000 bp, Homo sapiens
tgtactgaatgttttctaggttccagccatcatgttaggcaagtggatacaggttggctgtacaagatcatatcagctatgtaaatccataaatgatggagtaaaatgatgaggataaactatttgaattccatctgggtgaggcaggcgtgagaagagactaccgaacattatttatttagttatttatttttaagacagggtcttactctcttgcccaggctggagtgcagtggtacaatcttggctcactgcaacctctgctttctaggctcaagcaatcctccaacctcagcctcccaagtagctgagactacaggcatgagccaccaggcccgactaacttttttttttttttggagagatggagtttcaacatgttgaccaggctggtcttgaactcctgggctcaaagtgatccgcccacctcagcctcccaaagtgctaggactataggtgtgagccactgtacctggcctgaacattacttatatgtttctagtagggggcaggattggtgggtctctggatttactgtgtccttgaatagctattttttttttttttttttgagacaggggctcactctgatgcccaggctggagtgcagtggtgcaatcaagggcacttcaacctcaacttctcaggctcaggtgattttcccatgtccccctcctgagtagctgggactacaggcatgcaccactacctggctaatttttatattttttatagacatgggattttgccatgttgcccaggctggtctcaaactcctgggctcaagagatcccccagcctcggcttcccaaagtgttgggattacaggtgcgagccactaagcccagcctacttctttgtcttgaaatcacctctactctttgccaaaattcttgggccagggctaaatctatgggaaaagttttatcaaattatatacttgagggccatgtgcatgtgttctgactcagcttttcctgggagacaagaatgttgttagccctgttgagagctcttggttaaagtgattaggagcacagatcagagtttacagtctgagaagttggctgaaaagttgttaagcaagttaatgaacctgtctgagctcaagttataaaatgagggtaataataccgaccacattaagattgttgtgggggttaaaaagatatgcatgaaaatgcttggttggcagttaaacactagctaacagttattattattactatcattttattatgaatgtttgcttgggcagggattagctgattcatacatggattcctttaaaaacatttttctcctcaggcaagcaaagcagatctactttgtttttattaatgattcaccttctttagtaacaccttaatagcatttcctgtacatgattttttgaaaatagcagagatttgccattgcgtggctggtccctgtgaccctgttaagccttatgttttacttaactcggaagcacgaaccaaccacccagtacttgggagaatggtgtaacagggtgcccggaacacacaaatctactcacaggaagacagtggctgttccaagctcccagctgtagctgtgggaacatccagtattggagctggaaaacaattctgtaaagtgagcatgaatagaccacataccatcaagaccagaggtgctctaagagtaaaaggaaattaaacattttaaagcatacttacaaaaatataggaggttgagtgtcaaggaaagcaagaagagagattacaaccaataaaacaccagtgttctgacttatgcatcttgttcaacacaactagagtatggggtactggaaagaatacagagcagggagtcaggacacttgggtttgggtttttgctctgacagtcactaacttgtgggactttgggcaaacccttaattctccctggcactcagtgtctccatctgtcaattgagggggctggattaacaggatgatcctccctctggcactaacattctgaaatccactcccgtgctttctcctagttaacctccctaacttttcctgcagtccatggtgtcatggcttatactccagctttctcctccatttcctttcccccaaattccttctgcttttctccaaaaactctagggttggggaatagggtatgggtggtggttagtgtgaagttttttttttttttttaaacacttttgagttaatttttaagtgtccctaacttatacttttgtttttaacagaaatactttgctcatctgtttttattgtttagtccctcattgaagtttagttttgtaatttcctttgttgtcattctcattgttcttaagccagaatgaaggcaagaactataattaattagaatgctcattttctttaacctctgttatccaaattatttctgatataatgccatacataagggtgctaatggtgtttcttgacattggttatagtttgttttaaattgggactgtatatttctgacttgttaaataatggaagatttggggcattactgaatgcacataatcaatcccttaaaacatgctgaaaatggaaaatagtaaaatttaaagctttttatactacatgataatagcatttttttgtaccaaaaatgtagagccaaattttccactctgagatttattttttctgtcatgaacctttcaaagtaagatctctgaaaatgactaatagcccagtgttgattaaattgtataattaccagaagagaaaagggtggcagtgctcagagaatcaaaggaaattaatatctgctgtgtgactttgggtaagtcacttaacattcccgagcttaatttttctgtaaaatgaggaccatactactacctgcattagctacctcacagctcttttgtgaggagtacacaaaaatgcctaccttcgcataataatgacatgaggccttacaaagtataactgaaacataataaaattgaatgatgcatatgaaagcacatttacacattattctttcaaaattaccaagttataccatagaactgtaaggaattactttattagacaaagcattagtgttactcacttctcccaagagattgtgcctattgctccacctgcttgaccaagctatgttgcctgtgccatctttcctatcatcttatactgttattcatacatccttggattggcttctttcttaactttttatggtacatgccttatctcaaccagaacatatattgcttctttacattcctcttggagcatagtcagtgtgaatgtaaaaaggaagcgggattgttagagtgtatgactagaaagaacgtggagaaagtttgaagagagtgttctaaacactgggaagttattggatgtttttgagcaggtgactaacctaagctcacctgtgctttgggaaaacacatccggtgttcatgagaatagactggaggaaggaataactggaggctaggaagtgaatttcaaggagatggatggcatggtccagaagaaaaacatggagaatttaggaaagatggcaaaagcaaaatagacaggttaggctgttatttggttgtggatggtgaagaaatccaaagtacttactagtattttgtctttgtgaccagctaggaaaaacagacggttaaggatttatcttcttaaagaggaatggagtgtgcaaaagtgggagaggaatgtgatcttgatagtactagttagtactgactgggtctttctttgtacttttaattttatttaatacacaacaccaattgtagccattttgattttctttcttctccagcggactttgaatttaagatttttctttgtgatcctgtgcaagcctaggttgtttaagaaaaatacacgaatagtttctcagacacttcctcgtagcaaagcacttattaatgcttgtgactacaaataatcagcatttcttaggtttcttcctgtgtactgtatctcaacaactttttgaaatatattttaggaaaaaatttctagttctctaaagaggtgaatctcaatgggtggttaaatttcacaagggttgaaagatcttgtggtataaaagctctgcttttaaggtcgtgctacatcaaagacagttcaacgatagcatggaagaaagtgatatataaataacaagtaactcatacttaaaaaggcactactacgttttgttttttatatctgtaatgagataggtaactggttagtggctagtgaattaaaagcgaatcttagagaaaggggaaaagaacgcgtttcccacaaaacgcgtatattcagttctcattctatgatatctgccatttgatgtggttctgttcccctcctcccactttcaaattatttgtcgcgcgccagtggtcccagctactcgggaggctgacacaggaggatctcttgagtccaggatgtcaagtctgtagtgagctatgatcccgacactgcattctacccttggcaacagagcgagaccctgtctcaaaacaaaacaaaacagaaacaaaataaaaaaacaatgttttcaagaagcagagaccaagccccaggcggagtcgaactctagcaggacaagaacgcggtcggtccctttcccccacctgatccacaggtgcaggggtggttgcctaggtgacgctcagcgcatactccaggccaggcggctccggacaccgcgatgcggccggagttcaacagcaggtgacggcgggaaagcagagcggccacatagatgtccctgtactcggtaactcttgccctcccttgttcttctcgaaggtccttttttttctcgtgcacggctgacgagacaggcgcaagctaacttcccccgcactcctccgtcggcctctagagggccagggctgcggcgcctacaaagcctcgggatcacagctgggcctccttagctaccggccgggcgacagcgcgcctgcgcaccggcggggtcacgcgcgcggcgcgggggtgggcctgcgccggaggggctgtcatttgcagcgctggtcgcagccctcagctgcgccgggcggttccggctcctccctctccttgtgcctcagcgccaccatggtgctggagtcggtggtcgcggacttgctgaaccgcttcctgggggactatgtggagaacctgaacaagtcccagctgaagctgggcatctggggcggtaagcgagagggcgcggccagtgggctgcgggcgctgagggcccagccgagggctgctccgtccgggattctgcccgggccctgctccctgcgccgcctgagactccccatcccggtgcggcaggtgctagatgcgggagcctctgccgcccgcggattctcggggtcccagtcccgactccggctggggagatgcggcgggatcccgcccgcgctgccaaagttcccacctttctcgtcccccgaggccaagccctggccctgctgtccccgccctgcccgtttctgtggtcctctcgctgcactcagggtggcccctttggccctacagcataaaaacagagccctttctgtttcggtatcgcgtggagtgagcatggttgtctggtcatatacgctcgaagtggcactaagaaaaaaggaggaagttgcatctcgcagttatcttcactatcattttacagggagcaagaactgggttccttctctttaggattaccgggtttggagaggaacgggcaggagatctttaagataggcgtgtgcttagggattcttactcttaatgctttcagctcctgtgaaaatgatttcttcctttaatatttacttttccgtcaatacgaagaggattttgaattttgttttggagcaatagagagaaattcaagcctcgaccagcatcgtcattaattaggtgtctgcttggttgcatgctcaggaatttatgccaacgtttttatcctggagattaagtgtataaaagtattcaggaaatagtgtacttaaacatacactcttcaacgagcttaatcgtttgcatga

SEQ ID NO: 57 - DNA, 6000 bp, Homo sapiens
agagggagacagagtcttgctctgtcgcccaggctggagtacagtgatgcaatcttggctcactgtaacctctgcctcccaggttcaagcaattctcctgcctcagcctcctgagtggctgggactacaggcatgtgccaccatgcggctaatttttgtatttttagtagaggtggggtttcaccatattggccaggctgatctggaacacctggcctcaagtgatccacctgcctctacctcccaaagtgctgggattacaggcgtgagccactgtgcctggccagtttgcacaatttcaaacctcgaattactcttcatttggcttatgggcaagatattgggacaaaaaaggcatacttcattcattaattcaacactcactcattcaccaaccattggttaaaaaataacttgtccttcggtatatgccttacatgtctgggcacaaagctggtcttcatgaaaccatgggttgttagagcaggagggcccctcagaaatctggcctatcacctccattttacagataggtagtctgaggcttagtgaggggaagggcttatgctgggtcatataaacagtcagaactaggagatctgaaggttgcgcattctccactattattatttcttcttctttttgcttccttcttcctcctcctgcttcttcttccttttttatttatttttatttattttattttttttgagacagagtcttactccatcacccaggctggagtccaatggcacactcttggctcactacaacctccatctcctgggttcaagcgattttcctgcctcaagtaatcccaagtagctggaattacaagtaatcccaagtagctggaattacaggcatgtgccaccacacccggctaatttttgtatttttagtagagatggggtttcaccatgttggccaggctggtctcgaactgctgacctcaaatgatccacctgcctcagcctcccaaagtgctgggattagagacatgagccaccgtgcccggcctcttctttcagagacagagtctcactctgttgtgaggctggagtgcaggggtgcgatcatagctcactgcagcctcaaactcctgggctcaagtgattctcccacctcagcctcccaagtatctgggactacagatatgtgcccaccatgcctggctagtattttattttttgtaaaggtggggttgcatgttgcccaggctgatcttgaactcttggcctgaagagatcctcctacctctgcctcccaatgtgctgggattacaagtatgagctaccacccaccattctttgttttattttaattttttaattggagacagcgtctcgccatgttgcccaggctggtattgaactcctgggctcaagagatccacctgcctcagcttcccaatgtgctaggattaaaagtgtgagccactgcccccattcttaaattctgtatggatatctccctacagcctccctgagaaatggtcatctagctcctgtttgggtatactcagtgatacggagctcattacctcctgaggccacctgttcccattattgttcaactatgactattaggaagttcccccttatattgaactaaataccatccagttcagttattcttatgtagaatataatatctgttgaacacctgctacatagcaagtgctgagcactgggaaatgtgatgatctgtagaacatagaatgggttgtgagcataaggtatgctcagtgctatgattgaggaaactactagagaccaccttggactccctggtctggacacagtgggggaaggatccccgaggaagtgatgttagagcttagaaagatgatagggaagtagacagatgaagagaggaaagatgggagtttctggcagaaaaaaacagcatgtgcaaaggcttgaaggttcatagaaggtggtgtttagagtagtctttttttttttttttttttttttgagatgcagtctccttttgtcgcccaggctggagagcagtggcatgatcttggctcagtgcaaccttcgcctgccaggttcaagtgattcttctgcctcagcttcccaagtagctgggactacaggcgcccaccaccacacccagcagcaattttttgtatttttagtagagacagggtttcaccatgctggccaggatggtctcgaactcctgacctcgtgatctgccagcctgcacctcccaaaatgctgggattacaggcatgagccaccgtgcccagcctagagcagtattttaaagtctgatcagagcagacagcaacatgatgtggagggaaggagtgagattagaagggccaatgggaccttgcttggctacattaagcaatttgggccttacctaatcccttgaataaacaaaagaacaaaggctgggctcaggggctcatgcctgtaatcctagcactttaggaggctgaggcaggcggatcacttgaggtcaggagtttgagaccagcctggccaacatgatgaaactttttttttttttgagacggggtcttgctctgttgcccaggctggagtgcagtggtgtgatctcggctcactgcaagctctgcctcccaggttcacaccattctcctgcctcagcctcagcctcccaagtagctgggactacaggcgcccaccaccatgcccggctaatttttttgtatttttagtagagatggggtttcactgtgttagccaggatggtctcgatctcctgacctcgtgatccgcccatctcagcctcccaaagtggtgggattacaggcctgagccaccgtgcccggtcgatgaaaccttgtctctacaaaaagtaaaaaatttgccgggtgtggtagctcacacctgtaatcccagtgctttgggaggctgaggtgggcggatcacctgaggttgggagtttgagaccagcttgaccaacatggagaaaccctgtctctactaaaaatacaaaattagccgggcatggtggctcatgcctgtaattccggctactcgggaggctgaggcaggagaattgcttgaacccaagaggcggaggttgtggtgagccgagattgcaccattgtactccagcctgggcaacaagagcaaaactctgtctcaaaaaaaaaaaaaaaaaaaaaccaaaaacaaaaattagctgggcgtagtggtatgtgcctgtaatcctagctactcagaaggctgaggcatgagaatcacttgaacctaggaggcggagggtgcagtgagccgagattgtgccactgcattccagcctgggtgacagagtgagagtctgtctcaaaaacaaaaccccaaaaaaccaaaaaacaataaaaactaaattggaatcccatgggtctccctcaccctttggcaccctgcctgcctgggggaggccttatttagcttggcccagccctgctgagctttccttgggaatgtctatatataggggaagggggcagcccagttgccactgtccatctgcattccttggtgtccagcccccctttcctggccccagagcctgctatcggttgtcttggtgctctttctgtccacgtagccactgtctacaagccttgcctactccccagtgcccagcctgcaccttgtggattctcaggttgggctccctctggacttggtctgcccacccctttactccccagatgaccagatttcttcactgagctctaggaaggggccagctgtccttttaccacttaaagaaccttcccctgcctactccttacttcaaaaaaagtgaatccaaacaccctttccctggagaaggtaactttcagagaaggatctttgctttcaatgattatttctcctccaaatgcacatcctcctctcctccatccctccatacatttttccatctggacaggtgccccaaggactgtctgtcccaacttccctccagtcaggattaataataagaatcatcaacatgggtgggcatggtgcctcatgactgtaattctagcactttgggaaaccaaggtggaaggatcccctgagcctaggagttcgagaccagcctgggcaacatggtgaaaccccatctctataaaaatacaaaaaaaaaaaaagccaggggtggtggtgcacctctagtcccagctactcgggaggctgaagtgggaggatcacttgagcccaggagatagaggctgcagtgagctataatagcaccactgcacatcagccttggtgacagagtgagtatagacctttataatttacaaagctctgcagtcaagtggggataatcgttgctacctcataggaggagcactagatgagatcatgttaaaatgcttagcacagtgtgtggcacgtcatggggttcagtaaacagtggcctacctgtcactttctcctcctatcccctgccccttaccatggttcaaagacgggacattcctcttgccaagcaccaacgctgtgtacccagcacaagctaggtgacttatacccgggttcccatttaccatggtctctctgtgagggagaccccacagacaggtccaatcccacagatgaagaaatggctcagagaggcactgctaccggcccaaggtcacacaactcgcagaggctggccttggatcttgggttttggacttcaaggcttgtactctccccattttaccatgctgcctcaccctttactactctgatcatccttaccatcttggagccagtgtgcttcctcggtcggggggactccaaggcagtggaacagggcaggccttcctcacaagaatctaggacgtcaaggcctgccacctgcttggaggcttaaatttctctgcaagggcccttggctaaattaggtaatgggttcagactgtgggaggggtgggactcgctgaccccaggatctgattgggcagggtctccagtgctggggagcagggaggtgggaggggagggtgcccctacaaatcccgggggctagagcaggccaggtcatctttgggtggtggagtgcaaaggaggcgacctgcaacagaggagtcccggtcaccagcaaccatggtaaggacaagaggggactttgtgcctttactcacgggagcactctggacccctttcaggccaggcctgggtgctctgtggggcagtaacttggatgtttgaggttggagcatggaggttcctggaacccaggtgtcttggaggaaggcctttgacttttcttgaaaggggagggctgggatattccagagattgatccttaaggcttgctgactgcctactcacttctggaaacttccagcagtgtcattcatagacctgtgaagagctcttagcttgtttccttcacacagtggggactctgaggggtcagagtgagtcacccagcaggccagtggcaggggtgagccagaagcctggccaaaccctcctatcatcatggagagaagaaagcctcctccagaagacgggaggccggcagggcgtggggcctgctcagatgcagggctctgggagccctgaggatgatgggaaggggcagaagatgacagaccagagttagagagactccgctctcctagagagggcttctgatttggagctgttgttttggtctgagatccccctccccacttcacttcaaggagtaactagatcccagaggccagctgctgttgcccatgcctgactaaaaatagcctgccctcctggcatagggaaagaggaggagaggaaggagggggagaaggaggagcactggtggccagctggctgaagagctccttggaagcctcaccctgtcctcactgccagcctcaatccaaagcctctgacccagatggcctggcttggatatgacgtggaaacccctgcagaaatctcactttcatgtcaaggcctccatcacattcggccccccatgaggggccttttctccaatgactgaatcctaagaaggaagctgacagcctccgactctgccagttctctg

SEQ ID NO: 58 - DNA, 6000 bp, Homo sapiens
aatggtatattgaattatatgaccagtcttggcatcagtttaacatatttttaagtaacttttattttttcttcctttcttttagttccttttttttttcttgcaagtaggaagcaggaatgactgttcaattattagatattcaagtttagaattcactgtcattactgcacaattcatttgctgaaataacaagtagcagatgctacagtgcaagttaatgaataattcttatttgtactctggcctttcattgcaattcatttgttacagacatgtgggtttagtaattattattctcacactttctaaaatgtttttagctttttaaaaagcattttgctcatttttttatttccttctgtttgtttcattctatttattaaattctcccatttatcccaattgtttgggaagtctcatggctctttatggttctcttctgagaggaatatgaaatacttcaattgatttgttccttattgcaaataagccaaagccatggctcatttaccattaccgggtttgtttaccatttcacaggcacacttgaggcctcagctttcaagggcatgttttcagcctgttacaaaccatgcttggccttccttctctaaagtctgctccttcctaaccaggaaacagggcaggaatggaattttcttcccattccagtttctctttagctgcttgtgtccagaagttgatatggcatagctaaaattaatacctgaattgacccagttcaccttctgttttagaaacaacaacaacaaaaaaattggctaaaaagtaaaggcctgggtatttttagaaagagcaataattagtgtaaaatgtcacagaaatataatacgtttagattcatgtcagacaaaagttatttccaggaagcttctcaaagacaagaaaagggatgttggagatattgggaaaaagtatagtgaaattggtaagaataaataagctgcagtgaagcctatctgaagcatttggaatatgactttgcaagaggctcagaatagaatagagtaggaatctatccctgtttatctttttacctccctatccgtcttgtatagatattggagtaaaaagatgaggaatgttgcctcttgttcctctctctgtgactcacaacagtgatgctaaagtgaggaagtggcttcagacatgaacagaggtgggggatgggaaaaacggtcagtattaagaggcatgtggcatgtgtgaagatttaggaatttaaaacacacacacacatggtggaagctggtaagccttgccttttatacacagttctgaattttaactctgaggagaggagttttttggggtataattctctgtcgtaagaggctgccctatgtgttgtaggatgtttagcagcatctccagcctcaacccactcgatgccagtagtatccagttgtgacagctaaaaatgtctccagatattgccaacagttgtcccaggatgagaaccactgctgcaaaggtcacacgatgtggttgggcagggtgagtatgggaccttgagctggggtaagacctgaggggcagagttgtgagagttatggggaacgtttccaatttcttctatggagaaatgggaagagatggtggatgaaggaaatggagtggcatggtgggaatggagtatgtaaattcctaaaagagaaggaaagaatcctaaaggctgaaataattttttaagacagtagataaaaagtcatgtagcatttaaggagacttattttttctagaaggttgatttatatgtttattgagagggaaggaaagttagttaatcagaaaagaagggggaggtggggatggtaaatgagttaaaaaaaaaaaaaagttaaataatgaataggactggccaggcgtggtggctcatgcctgtaatcccagcactttgggaggccgaggcaggcggatcacaaggtcaggagttcgagaccagtgtgtccaatatggtgaaaccccatctctattaaaaatacaaaaattagcctggcatggtagcgggagcctgtagtcccagctactcgggaggctgaggcaggagaatcacttgaacccaggaagcagaggttacaatgagccgagatcgcacgactgcactccagcctgagcaacagagcaagacacacacacacacaaaaaaaaacacaaaacacaaaaaacgaataggacctactatttgatagcacaacggggtgatcatggtcaatagtaacttaattgtatgttttaaaataacttaaagagtgtaattggattgtttgtaactcaaaggataaatggttaagggaatggataccccatttaccctgatgtgcttatttcacattacatgcctgtatcaaaacatctcgtgtaccccataaatatatacacctactatatatccacgggaattaaaaattgaaaaaaagaagtggaaatagattgaaagctctccctgtagagtagaagttggatagattttgcagaaataaccttaatcccttattcctctcagtgaaggagcctatgaaataaaggagaattaaacatgtagttcttataattttcattccttcattcacttatctatatcctatgtcccatgtactatattatacactagacagtaaggatagaaagatggataagaaacaatccctgtctaaagatgtccacagtatactagggtagacaaagatgtgtaatcagtttgattgagaatctcacctcaagaggcataagcttgaaagtctcatcatttctacacttggtattttgtcagatttcattgcttcaaagtatcagcctccttagttattaaaactttcattctaggtattaagattaggtcctactgatttaaaatattagtctcatatttatttcaaaaacttcctccatgccttccagagcagactagacccgtagttccaactttctttatacacacccctttttttccatgtgcctgctcttccgatggtggggtcaggaggtttaagaaggaaaacaggcaatgccttaaatgtctgactgccgccatgttgctatctgctttctgtaggtcattgttagaatatatggggttcctaacagccccactgataactcagtatcaagcagtcctctatgctttgatagccctttgcaagacttctgcatctgtcagctgacttccatttggcagtggtgaaacacattcttctgatacatagaaatcccttgtcccatgttatgttccatggcaagtgtgtgggcctcaatctcctgtgctctctgtgatcccagctctggggcctgtagattccgacaggatccatagtccagatatcaccggatttctctgtagtccctaccaactctccccagtcctccaaaattcctggaaattcatagcgtaaggggagtcagcaagctttgtggcaaaggaaacatccagatggggactggagatatcagcctcctcttgaagacaccccaaaactttactagtatcatgtaataggtactaatgtcctgaacagaacatgaaagacactaaccattaatgaaacaaatggacaatttggataaattcataatttatttacttatttttctttctttttgagacagggtcttattctgtctcccagctgggctggagtgcagtggggtgatcactgcagcctcaactttcagggctcaggtgattttccctccaagactcctaggctcaagtgattttccctcccagtctcctgagtagctgggtctacaggtgtgcaccataccccgctaatttttgtattttatttatttatttattttttgagacagagtcttgctctgttgcccaggctagaatgcagtggcgcgatctcggctcactgcaagctccgcctcccgggttcacgccattctcttgcctcagcctccagagtagctgggtctacaggcgcccgccacgatgcccggctaatttttttaattgttggtagagacggggtttcaccgtgttagccgggatggtctcaatctcttgacctcgtgatccgcctgcctgcgcctcccaaagtgctgggattacaggcgtgagccactgcgcccggcctaatctttgtatttttttagagacaaagtttcaccatgccgcccaggctggtctctaactgtattttaaaaatacaggcggccgggcgcagtggctcacgcttgtaatcccggaactttaggaggctgaggcgggccgatcatgaggtcagcagatcgagaccatctggctaacacggtgaaaccctgtctctactaaaaatacaaaaaaaattagccaggcgtggtggcgggcgcctgtagtcccagccacttgggaggctgaggcaggagaatggcgtgaacgtgggaggcagagcttgcagtgaaccgagatcgcgccactgtactccagcctggccgacagagcgagactccgtcttaaaataaaaaataaaaaaataagaaatacaggcagggcgcgtgggctcatgcttgtaatcccagcactttgggaggctgaggcggacaggctgcttgagctcaagagttccagactagcatcggcaaagcagggagaccccatctttacaaaaaaagtagcctggcatggtgttgtgagcccatagtcccagctaagtagggcagaggtaggagaatcacttgagcccaggagttccaggctgcagtgagccgtggtcgtgccactggactccagcctgggtgaaagagcaagaccctgtctcaaaaagagaaaggaaaaaatttaacatcaagaacttcctttcatcaagacaccactgagagaatacgacaacccacagagtaggaaaagagatttgtaatacacatctgtaacaatggacttcctcctagaatagagaggataaaaagtagcaacacttccgcttgcacccggacggaacttcctgtcacggaaaagaacatcctgtcacggagaagaacatcctgcagaatttcctgtcacgaggaacattccgcaggaggaaatggaggctgaaaggctgcgactcctcgaggaagaggccaagctgaaaaaggtagccagaatgggatttaatgcatcttccatgctccgaaaaagccagctaggtttcctcaacgtcaccagttactcccgtttagccaacgagctgcgtgtgagctgcatggagcggaaaaaggtccaaattcggagcttggatccctcctctttggcgagcgaccgatttaacttcattctggcgagtaccaacagcgaccagctcttcgtagtgaaccaggtcgaagtcgaaggctccaagtacggcatcatcagcctgcgaactctgaagatcccttcgttccacgtgtacgtgctcagaaacctctacgtccccaaccggaaggtgaagtccctgtgctgggcctcgctgaaccagttggactctcacgttctgctgtgcttcgagggaatcacagatgctccaagctgtgcagtgctgctcccagcgtcgcggttcttaagtgttcacacaagagttaaccagcctggcatgctctgcagtttccagatcccagaggcctggtcctgtgcgtggtccctcaacacccgggcatatcactgctttagtgcaggcttgtctcagcaggtcctgttgaccagcgtggcgacgggacaccagcagtcatttgataccagcagtgatgtcttggcccagcagtttgctagtacggctcctttgctgtttaatggctgtcgctccggggagatctttgccattgatctgcgttgtagaaatcgaggcaaggggtggagggccactcgcctgttccatgactcagcagtgacctctgtgcaaatcctccaagaagagcaatgcctgatggcatcagacatgactggaaagatcaagctgtgggatctgagggccactaaatgtgtaaggcagtacgaaggtcacgtgaatgagtccgcctatctgcccctgcatg

SEQ ID NO: 59 - DNA, 6000 bp, Homo sapiens
tgaatactgtgagtaccaaaggtgctgtgctgagtgccttaaaactttgtctggtgtggctcacgcctataatcgcagcacttcaggaggcagaggcaggtggatcacctgaggtcaggagttcaagaccagcctgaccaacatggtgaaacctcatctctagtaaaaatacaaaaattagctgggtgtggtggcgggcgctactcagctactcggaaggctgaggcaggagaatcatttgaacccaggaggcggagggagccactgcactccagcctgggcaacaagagcaaaagtccatctcaaaataaataaataaataaataaataaataaattttaaaacaatcctatatataaagcagttcttgtagcggagatagatagctgctcactaaaacttgatttctttctctttctgggaccacagctagactgcattttccagacttccttatggttagctgtgatcaaatggttaatgaggcaataaataaaaccaacaacactaaaaccaaaaattgagctcttggtggaggagaaggcacattgcatccttagtagaagtaaagtttttcctagcactcagctttgtaaaggaacacattttacaaggcacctgctaggcacacacagcactgagctagatgctttctatacgtgcatggaaaataaacaaagggcaacaaagaaggaaaatgcagtgtctgatgtctgtagtcactgaagtccttcacatgttggggaatacttgacactaaatgactgaaatcccaaccaaagcatttgaatactatttaactggaatgaattgcatttaaaaatagccatattgagatataattcaaacactatttaacatgtgcaacacaaagtttttcatgtattgacagagttgtgcaaccattgtgcgaccattgtcatgatctaattttagaacattttcatctccctctaaaagaaactctgtactcattagtcgcctttcctatcccacatgtccccacagccctaagcaaccactaatctaccctccatcactatcaatttgtctgttccgaacatttcatagaaatagaatcatacaataggtagtttctttcacttagcacaatgttttcaaggttcatccatgtcagcgtatatagcagtacttcattcctttcattgctgaatcatattcgactccatggatattccacattttgtttatttatcaaccagttgatgcacattcaggttgtttccattttttgactattataaataatgccgctatgaacaattgtttcttcctttaaaaattgacatcccataaaattcactcttttatttttatttttgtttatttatttatttttgacacagagtctcgctctgttgatcaggctggagtgcagtggcacgatctcggatgactgcaacctccgcctcctgggttcaagcaattcttccgcctcagccttccgagtagctgagattacactcgccagccaccatgctgggctaatttttttttgtattttagtagagacgggattttactatgttggtcaggctggtctggaactcctgacctcaaatgatccgcctgcctcgacctccccaaatgctgggattacaggagtgagccaccacgcccgggccaccctttaaaagtgtacgatggaatggctttggcatattcctagaatgatgcatctatcaccacaatctaattccagcacatctcatcactcccaaaaagaaaccccttaagcagtcacttttcattcctccttcccctgaccccctggtgactgccaatgctctttctgcctctatgggtttacctattcgagacatttcacatagatggagtgatacaacaggcaacctttggagtttggcttctttgacttagcgtaatgtattcaagataatatataacatatattctatatgttatagcatagatcagtactttgctcctttttacggctgaataatattccatcgaatgggcatacaacattttgtttatccagtcattatttctgagaagattttgaggtcaactctgaggcaagcagggaagagagctgtggctgtgtatatctgcaatgtgctgggtcagagagcactgtgggccttcccatgtgctacaaattttccaacctgatattagaagaatgatgcatttgagacgacgttccagtgtgacttgagatgtctggcaaatgtgtaaaattgtatactgaggaaagtggtacctaatagctagaatgttttctaagagaccttcagatatgtgcaggatcccaagaagtcagagatataatagaagggtaagaagagatgatctgattcttcctctttgttttctcattaaaaaagcaatcaatgccaccataaattctaacatttctaaaattacatttttttaaacaaaattatccagggacttctgaacactgggagacattttcaatagatcaagggagaacgccaataatgccctactgcaaatagagatcaaagtaaatgtggtgggacagatgtgatttaaaatattctctcccaattcaaatcaaaaccacaatgagataccatctcacagcagttagaatggtgatcattaaaaagtcaggaaacaacaaatgctggagaggatgtggacaaataggaatgcttttacactgttgatggcagtgtaaattagttcaaccatcgtggaagacagtggggcagtttcacaaggatctagaaccagaaataccatttgacccagcaatcccattactgggtatacacccaaaggactataaatcattctactataaagacacatgcacacatatgtttattgcagcactattaacaatagcaaagacttggaacaacccaaatgtccatcaatgatagactggttaaagcaaatgtggcacatatacactgtagaatactatgcagccatgaaaaagaatgagttcatgtccttttcagggatatgaatgaagctggaaaccatcattctcagcaaactaacacaagaactgaaaaccaaacacctcatgtttctcactcataagtgggagttgaacaatgagaacacatggccacaaggaggggaacatcacacacccgggcctgtcgcaggggggctgggggctaggggagagatagcattaagagaaatacctaatgtagatgacaggttgatgggtgcagcaaaccgccatggcatgtgtatacctatgtaacaaacctgcacgttctgcacttgtatcccagaacttcattgtgtacattgtcttttcactttcttgatggagtcttttgaagcaaaaagcttttaattttaatgaagtccaagttacctattatttcttttgttgcttgtgctttggcgttttatatataataggaatccattgcctaattcaagatcgtgaagatttactttgatgttttcttccaagagttttacagttttatttcttacatttaggtctttgatccatttcgagttcatatttgtatatggtgtgaaatatggatccaactttattcttttgcatacagatagtactcatagaatcatttttttgaaaagactcttccctgtggaattgtcttggcaagtttgtgaaactcatttgaccctaaaagggggtttttatctccagtctctcacttctattccattaatctatgtatctacccttgagattgagagagctagtaattaaccgattaagaactgtttacttggtcaggcgcggtggctcacgctggtaatcccagcactttgggcggccgaggagggcggatcatgaggtcaggagtttgagaccagcctggccaatatggtgaaaccccgtctttactaaaaatacaaaaattacctgggtgtggtggcacgtgcctgtagtcccagctgcgcgagaggctgaggcaggagaatcgcttgaacccaggaggcggaggttgcagtgagccgagattatgccaccgccctccagcctgggctacagagcaggactccgtctcaaacacaacaaaacagaaaaaaactctttgctcaatactcctatggacttaatagcaatgattgctgctaatgtgattctaatactttttgggcatgccatcattgtttaatttcagagcaaactttctggaactgataaataataagctctccttaagaaattaaagtgcattaaaataaattgctttcaggggttcttaaacaagttcaagacatccaggagtgtgatacatttgagcgagaaatagctggcctagttcactctccacattaatcagaacgtctcccaccttctttttagggataagcactctcaaatatcattattcataaactaggggagggccgggtttccactcgcatcagttactttctctcccctgagaatatcttgcagccgctggaattttgggcccctttgctaggaggcaattaacaaattgcacttttactatcaaagctgagagtggcccagcagtggccctggccctgccggcacgcttccgatgcgtcgccctggcctgaagatcgccacagtcgggttcgcgccccgtggtcccctaaggcttccagggcgctggagctggtgcacaggacctgctcctccagggtccccatctgggtctccagcggtccttcctctctgccttctcctcgcagagcaccccgtgggcctagtctaaacgagggcaccactggtccggagttgcacttgttcgctccctcctgggctctggcagcgctgcatccccggggttgcttcgggttcgggcccaatagcagagtcagagccgagacgcatgtcccctgcaccggccaagggtgccgctggggctcgcgccaaggaggcaaaggcggggaccagaggcgccggaggcggcgcaacgcgcacaggtggcgcccggcctggccaggctctggcaggcgaggctgggtgtggtcgtgaaggggcgggcggaccggccccacactgcctcggttcggcaagtgggtcagttggctggggctcacttggcaacgggacgcgggaacgaggggcgcggacgcaggcccgggaggacgcggcggcgggaacctgggggcgcagggctagggcagcgggcccgacccgcacggctttcctggaaagcgctgcccctcgccgcggcgatgccctcgctgtggagagaaatcctcttggagtcgctgctgggtaagccgaagcccctcgccgcgagttcgcgggtgccagctccccgggccatgtccagagccgtggagccaggccaggttggctgagttcaggtaggaggaaaagggcgctccgtgcccagagtggagatgcttatcgtcccctgggaacttttcctactgaagggaataaaggaaaagacctagattgaagtcttcaagctgagtctgcgaggcgcccgcgagagaccccgtcgcccgagttcccagcagccctgggattgtgcccaaggagcgcgaattctcctcgtgtcggccttgaccccgcgcggccggtaccgtccccaaagccccccacccgtggcctttaagtttaacttaatacagttcagtgctgaactttaaaattcagaaggaaaggggcacccgttttccccaggagctgtaggtggacactgggcggcagctgctgccgtgggctgggcccaggacaagtggccttggtgtcggctgcacacttgggcatttggcgaaaagcatcagactcgagtctcatctgctctctcaccagctttgcaaaatcccgaggacaattttattggtgtaattctgtcggagctgtgtgagtaataaaatcaaagttcccagacaaacatttgggatattgctagaatccccggttcgttacaaaacaaagatccctctggtctgggtggggcgccttcctgagaacttgattttctgggagctggtaattctcgggagtgcttcagactatttttttctggctcagcctgt

SEQ ID NO: 60 - DNA, 6000 bp, Homo sapiens; identical to SEQ ID NO: 11

SEQ ID NO: 61 - DNA, 6000 bp, Homo sapiens
caccagcctgctgggaattcctctactgccaggcttctggcttctttcttggagaggagagggataagaatgtgatggggtggggctatcaggaaagctgggatgttaactgattcaggggatgccagggagctataaagcagcaccaatcattgtagctacttgctcagcaccgcacccagcttctacctagggtagcaaaatggaagaggaaagccgtgtagagaggggtgacacctgaattaatacacctacaattacactatacgggaacatatctctgcaagtacatgcatgttccacccagacaaaccgtgacgtcagactccactcttgaaacacccatgaaacctacctgccctgtgtgtgctccggcctctcattacagagccttagcactactggccagatctccaaaagattcttcagattctccatttagccaagaaactgaattagaattatgacctctactttctctgcttatttaagtcctttctgttgctatgaagcctggtctgaccactctcaataagtgaagatcttttagggagatccagaacagagagggaatgggaccctagagagcggaaacttgcccagaaaatcttataaactctgccaagtgctcgcctaacgtggggattgctgttggccctagttgcttaaccagtgagcggcaacgccccagcctggaatcaggttttctgacctctagtctggtactctttctaagcctttctaaggtgaaaatatgatacatttcccagacaccttaaaaatcccatttctgggccgggcgctgtggctcatgcctgttatcccacactttgggaggctgaggcgggtggatcgcctgagctcaggagttcgagactagcctgggcaacacggtgaaaccttgtctctgctaaaatacaaaaaaattagcgaggtgtggagtgcacgtgtagttccagctactagggaggctgaggcaggagaattgcttgaacccaggaggcggaggttgcagtgagctgagatcatgccactgccctctaggctgggtgacaaagcaaggctccatctcaaaaaaaaaaaaaaaaaaaaaaatcccacttctgtctctttcgtcttcccttgcctatcatgataggcctcccaaagtgctgggattacactccttctccattctctcctgtgctttctcagctgctgtcttcacaggttgcttcttagaatgtttttttaatacacacacaaggtttcaatgcccttttatacaagccatattttaatttacaacaaaattatgatgttatacaactgcagcttatgtggccttacacagtaaatgttcagaatggcagcttctgtccgtccagtagggttctgcactgcttggcatcctactatcttccaagtcaataagtgttaggatctccttgcctggaaatgatcatgtaagcaatgttgctgatttcctcttgaatttatattaccaaaggtacttttggtggggtggaggaagggtccaaatgccccttaagccctaagtgttgatttctaaatatttattaagcatctactattgtactaatatgttagaaatctttttaattgctagagggggagaggacttgagctctaaaggcggctaagattcattcctgccttttccttttaagaacatataatttagccggcaagatgtacatttcatctttacttttctttttttcttttctttttttgagacagagtctcactctgttgcccaggatggagtgcagtggcgcgatctcagctcactgcaacctccgtctcccgggttcaagcaattctcctgtctcagctgggattactggcgcgcgccacccgcctggctaatttttgtatttttagtagagacgggtttcaccatgttggccaggctggtctcaaactcttgacctcaggtgatccacctgcctcagcctcccaaagtgctgggattacaagcgtgagccatcgcacctgggcacatttcaccttttctaaagattattttaaggccaggtgcagtggctcacgcctgtactcccagtactttgagaggctgaggcaggtagatcacttgaggtcaggagttccacatcagcctggccaacatggttaaaccgcgtcactaccaaaaaatacaaaaattagccagatgtggtggcgcgcgcctgtagtcccagctactccggaggctgaggtgggagaatcgtttgatctggggaggcagaggctgcagtgagccgaaatcgagccactggactctagcccgggtgaagagtgagactctaaaaaaaaaaaaaaaaagaaagaaagaaagaaaaaaagattctttaaagcccccaacgagtttcactgctggcctgatctcacaattctcaatggctttttaaaaaaatcgtatttcactgaatatgaagtgaggttagatcaccatgccaactagtggcctcatcaatactgatgtgtgtgtatttaaatcattacgtttctcggagccatcagctttcacgctgtaaatgcgtttatgccctagcaatgccatgcccgtttctatgcagtaacccgccagcttgggtatatgtttcttcgggacctggggtcaaggaataaactctctgactctaagcaccttgaaagctacgaggcccagaaacagggcctgcatgcaaatgaatgccctaggcaggtctgctcgctgggtaaccttcccgcgccgggaggcagggtggcgggtggcggaggtcttccgggcccgggaggaaacctgcccgcggcgcgcaggcgagcccccacccccgctccccttctcccgccgggatgctgcccctcacagctcgtcagccggccaaatgcattccagagctgtgcacaagacacacttctccaggcagtcctagaaaccggagcccggagctgagagggcgggagggagcgcgcggccgccgctgaggtcatattcacgccgcctccccgccctcggcggctgttcccctcagcgcacacttcccagggcctcggtccagtccggtataaatgtcttttaaaccgagacagcgctctcctccccttgccctcgggcgcggccaagggatccaccgccagggcctttaaaacaaaaccaatgaatgaagcgctagggcgagcgcgcgcgagatggccaccgcgaaacccagccgggtcgaaatcgggccaccgacccgctcgctcagctccaaaactcgcggcgaagcccgctcggtgctccctgcttttccaatttctccatggctccggccggggctcaatccattctgggagcttctctgccccccacctatctctctcccctccatcggtaccccctctacagacccgggagggggtggcggtggcggggggttggggggagaaatagcttttagaaacccgatctgttgtttgcgaaacacaatcgctttttttttttttttaaagcgacagggtgtctagacggccacgtgacgaggccggagccgggcgcgccactgcgcagtggaaccagccgagcagagggccggagggggggtgcgggggggcggggaggaggcggcgcggctgcggcggctgggggcgggggagggaagggggaggaagggggagggaagggggcgggggcgggaggccttgcgggaggcggtgagccccgggcacactcgcttgctgctcggcgcacggaagatcctgtccccgagccgcgccagccgagccagccgggcgccgtgctcggtccgctcgccgcgcgggagagagctgcccgagacagagccagtccgtcggcgccgagccgccgagcgcccggcccctgagcccctgagtgcggcgcggcgagcccctggcggcggcagaaggaccggagcgccaggagagggcggaccggggacaaggaggctcccgggcgcgacgaggagagtctcggaggaggaggcgccgagaggacaccggggcctcctgccgccgcagctgggtcgaggcgagcagcccatgcggggagcctcggcggccagccgcggccaggggaagggacatcggcggcccctgcactagcaagcagcttgtgcccggggggggcgagaacgcgcgacccgtctggggccctccgccgccgccgcgccaccctcccccgcgctgtcagccccgccgggctcagccgccgccgcagcatcttctgcccctgcgcccgcgccagcctcgaggaagtccccgccgaggacctgggcccccaggagcgcagggggaaagaccagagactcccctaaaccacccagatgcgcaggattgaagcggtctagccaaagctttctgtggattaaaaaaatacacgatttttttttttttttttggcagaagaaaaggagaggaagaccagcggggctttgcaaggaaacggggggatgtaactcgtggatacatttttccacccatcaaacatcttgttatactttgtaaacattttctttttttaaaccccagttccagccggacgcccccagacctctgaggttcgaggaggtggtggttttcatttggggctttgcatatttggttgttaggttttgcgagagccttcttattttgccagacgtctcatgcggggtgaagtccactcggccccctcccctgagtcttcgtgtgcgcggaattcgaggagatccggttactaaggatatagaggaaaaaaataaatcgcttgcttttttttttttaattgcctgcttctccccacccccaaattaagttgcttagcaagggggaaagaggctttttccttcttccaacagcccagccgaacgcctttcgttttttgcccccgcggaccttccatgtaggaagccgaggctggcgagcccgacattcgggagccactgcgggggggcctctttttggggaggcgccgacgggggcaggctcggccgtccccagggaagcggcggccgggttcctccggggcgcgccggggccggagagccgcgcagggcgcgggccgcgcggggtggggcagccggagcgcaggcccccgatccccggcgggcgcccccgggcccccgcgcgcgccccggcctccgggagactggcgcatgccacggagcgcccctcgggccgccgccgctcctgcccgggcccctgctgctgctgctgtcgcctgcgcctgctgccccaactcggcgcccgacttcttcatggtgtgcggaggtcatgttcgctccttagcaggcaaacgacttttctcctcgcctcctcgccccgcatgttcaggaccaaacgatctgcgctcgtccggcgtctctggaggagccgtgcgcccggcggcgaggacgaggaggagggcgcagggggaggtggaggaggaggcgagctgcggggagaaggggcgacggacagccgagcgcatggggccggtggcggcggcccgggcagggctggatgctgcctgggcaaggcggtgcgaggtgccaaaggtcaccaccatccccacccgccagccgcgggcgccggcgcggccgggggcgccgaggcggatctgaaggcgctcacgcactcggtgctcaagaaactgaaggagcggcagctggagctgctgctccaggccgtggagtcccgcggcgggacgcgcaccgcgtgcctcctgctgcccggccgcctggactgcaggctgggcccgggggcgcccgccggcgcgcagcctgcgcagccgccctcgtcctactcgctccccctcctgctgtgcaaagtgttcaggtggccggatctcaggcattcctcggaagtcaagaggctgtgttgctgtgaatcttacgggaagatcaaccccgagctggtgtgctgcaacccccatcaccttagccgactctgcgaactaggtgagaagttgtccccctacccccaacattttccggagcgccagtgctggaagaaaagcccctagggcagtgcgtttgtgcagccatccctccaggggga

SEQ ID NO: 62 - DNA, 6000 bp, Homo sapiens
ggaggagtctaagagagggaaggtcatctaggcctcccttgattatacaagagagttttctctaagctctataagatccatctcagcttactaaatctaaggttccacagagggcttttggaccctgtagaaactttaaaacatggcaccaaaattcctgacactcctcttgagaagtagggcctatgtaccctctccttgaatctgggctctgtgtgtggttgactgaaagaatatggtgaaagaagagttgctgtggcagtttctaaaccgaggttttaaaaactggcagtttctactccccatctcctggaatgtttactcttgaagagtaacatttagccatcatgctgtaaaaagaaacctaagcaactcatggtaaactccatggtctttagggaaagagcgtttccacaatgttagggagagccaagaaaaatttaaatagtgtattttccagcttcccgtctctacaccaaaattaagtattgacactcacaagaggaaaaaagttatcctctgtcagccatgtgaatgagccttcttggatatggatcctccagccctcagctgagctgccccagctgatgccatgtgggatgaagattagctgtccccactgagcccagcccaattttcaggtaataggcaaaataaatgtttcttgttttggctggacgccgtggctcacgcctgtaatcccagcactttgggaggctgaggcgggcggatcacttgaggtcaggagtttgagaccagcctggccaacatggtgaaaccccatctctactaaaaatacaaaaattagccgggcatggtggcgggtgcctgtaatcccagctacccaggaggctgaggcaggagaatcgcttgaacctgggaggcagaggttgcagtgagctgagatggtgccactgcactccagcccaggcgacagagcaagactccatctcaacaacaacaacaacaaaaggcagggcttggtggcttatgcctgtgatctcagcactttgtgaggccgaggcgggcggatgacctgaggtcgggagttcgagaccagcctgaccaacatggagaaaccccgtcactactaaaaatacaaaaaaattagccaggcgtggtggtgcatgcctgtaatcccagctacttgggaggccgaggcaggagaatcgcttgaacccgggaggcagaggttgtggtgagctgagattgtgccattgcactccagcctgggcaacaagagtgaaactctgtctcaaaaaaaaagaatgtttcttgttttaagtcattgatttgggaatggctgttttgtagcaatagataactggaacagactcaaagggccaactagtcataaagtgtttttttgcctcaccttgtcattcctggaaatgactccctggaaaacccttcgcagagatgggtgtctgggtttcagtttttagaaatctttccacattaatattttccttagttgcctaacataactggcagaaggagacaggcaaggaacaggacattaagtactcaaccaactgtggtcataattatccagaaagtttttttctctgtgaaaaaaaaatcaccacatattgctttaagtaggtttactaggaagtttcagacccaaacccctgtgtggaatccttagttctggtgttctatcatggaaacaacaaagactgtctttttgtctctagcccaaggccttcactaaaagtatgccaatagcttcctagccctttttctcacagacaccatatccttaagatcttttaactctaattgtgtgaacaaaggaaaagaagacacatttgttttgatatggcctttttcatactcctgctacccattcccaatatgaccaattgtccttgttcttggctgcccatgtcctagctcctcctccccagaagctgaagggtttggagccttcttttttttgagacagagtcttgctctgtcgccaggctggagtgcagtggtgcgatctcagctcactgcaacctccacctcctgggttcaagcaattctcctgcctcagcctcccaagtagctgggattacaggcatgcaccaccacatccagctaattttgtatttttagtagaactggggtttcaccgtgttagccaagctggtttccaacctcaggtgatctgcccaccttggcctcgcaaagtgctgggattacatgcatgagccgctgcgcccggccgtgtttttttatgtgaaaattcacatatctaaacgtgggtccctgtttttgtatagccttcaagctcaaaataatgttcacattttaaaatggattttaaaaataaaaataaataatattttgggacacatgcaaattatataaattcaaatttcagtatccatagaaaaatgttttgtttttgttttgagacagggtctggctctgttgcccaggttagaatgtagtagcacgatcttggctcactggagtttgcacctcctaggctcaagggctgctcccacctcagcctccacctcctgggctcaagggatcctcccacctcagcctcccatctcagccttccgagcatctgggactacaggtgcacaccaccacctgtagtgtagtgtaggcctggctgggcgcggtggctcatgcctgcaatcccagcactttgggaggccaaggcaggaggatcacttgagcccaggagttcaagaccagcctggacaacatggtgaaaccccctctctactaaaaatacaaaaattaaccaggggtggtggcaggtgcctgtaatcccagctacttgggaggctgaggcagaagaatcgcttgaacctgggaggtggaggttgcagtgagccaagatggcaccactgcattccagcgtgggtgacagagtgagactctatcccccccaaaaaaatttttttccagctgtgataataaaaaatatcccattctcctttctatggtgggaaggaaaaggtagaagttgtggagaggaaagaggtagaaattaaagggagaatggaaaagaagggcaaacaaaggcaagtaggtgaggagaaggacaggaaaagagacagggagaagggagggacttataaatgggaaaagaagggtaggaaggatgggaataagtaaaaacaacaacaacaaaaagaaagcaaggagagagagtagagatggggaagagccagaaaatgctgagtgagctaagaaaggaccaccaaaagaaaaaggagaatgggggtggtcagacagagggctataccactatcttcctctcctgtttgctttcgtttactaacgtcctggtcactctgccctaaacagcttagttcctttcccatagtctttgttcactccagcactatctgacttgaacttgtacctgtacgacaaatctaacaccctggactcttagttctaaaaacaggacatgcattctgcctcagtcttccattcccatggtctcaccctggaccttggcatcatcagaaactcagaagctgggacatttcaattccaaatatcccactcagaccagcagcatccatactgccagagcacttgctcatataccccactgcaatctttcttgggccaatgctctaagacattggtccctttccccaccaccctccaacccctccactaccaggcttcatgtgccattatttgctttcctgtatggttttgattctacacacagcatcatgaacattctcttccaaacactctcatcacttggccccctctctctgttgtacttgccaggcaaaatcccaaccctcagtaaatgcaacaagctgccttctctgcctgtgcctgaatggccaaacatcttcaattattttgaatccgttacctcaaatatcaaatgagctcttaacgttggccagaaggccttttaaaggcctgtatgcaccaaggctcagttcttgaacgtctccttttcttctcccttaagattcttccctaatgaagggggcaggcgaacggagttaaagggcttccattgctgttagaatacagcccaaattcctttccataatcaaaagtcctgatctgccaccgacctcactttctcaacttttcaccttccattctcccctcatttgactcagccctggtctcactgtcactggccttttttccttttttttttttgaagcagtctcattgtcacctaggcaggagtgcagtggtgctattacggctcctaggctcaagtgaacatcccagtagctgggatcacaggcacgggtcacggtgcccggcttttaaatttttggtcgagacggggtctcgtcatgttgtccaggctggtctcgaactcctgggctcaagccatcctcctgcctcagcctcccaaaatgctgggattacaggcgtgagccaccgcgcccagccaggccttccttcaattgctttaacatgccaaaccaacttagattttttgcacatgcttttctctgtgggacactctatcctggtgtttgcctggtttcgctcttttctatccttttgtcttggcttgaatgtcacctcttctgaagccttctctggcgaccctggccatcttatgtcctacttgttatttcttcaaaatcgtactgccttttgtatgtactggtgtttactcattcacactggctacctccccatacctcactggctggaatggaaactcattgcgagcagagacaataggttttgctctcccgcggatcacgtcccagcctccagctcagcaccagacacttgagggcgcaggataaaatatctgcagtcagaaagcactaataaccacccaagggttggaggaaagctggcgcggaccgcacgagtgtcgccgagacgccgccgccgtgcgaagctcctccccttccgacagggccgcggacgcccgggcagccacggcggcggggccgcggcgggcgccggctcagcccgcccctttctcccgccgcctccccgccccgccccgcgccgcgccggccgctgtcagctccctcagcgtccggccgaggcgcggtgtatgctgagccgctgccgcagcgggctgctccacgtcctgggccttagcttcctgctgcagacccgccggccgattctcctctgctctccacgtctcatgaagccgctggtcgtgttcgtcctcggcggccccggcgccggcaaggggacccagtgcgcccgcatcgtcgaggtgaggcccgggcagcaggcgggctccttggggcttgacgggatgcgggccggcctgtcccgccgcccctagtccgcgccccgcggagtcgccgagccgcagactacgagtcccggcggccaccgcgccgcccgcgtggcagtggccgagggccgccggcgcgcggcgtgccgggacttgtagtccgcgcccgcccgccttgggggccaccgcttgaggtcgctttgttcctgcgccccttcttttcttacattttggggaccagattcgtctctagagtgggctgggagagggatcccggaggccaacctttgggggtcccccagcgcgcagaggttagcgtgtcgctgatcgtgtggcaggtgaaggcagcaggagcgcggatttgggttagaggccgtgtgcgcccacagttgtctgaaggagagacctatttttcttctccgcgccttccctctggttccctaaactccgcactgtcaccgaacgtgtctttactctagaaaggaggcccgtggggcggggtgttattttaggcgtgctgtgggctgccgctggcactctcgagccccgtccccgcaagctttagggcggagccagccctgaggctcggcccgggtcggggatggggaaagccgggagtgctgttctgagatcaagcttcaacctttggccctgctgccaactcacgctcggccctcggtcacttcctgtctcccagcctcagttagcccttgtaatacagtaaaaagagtctctgaacccagattttctcaggatataaaacacctcccaaatgt

SEQ ID NO: 63 - DNA, 6000 bp, Homo sapiens; identical to SEQ ID NO: 35

SEQ ID NO: 64 - DNA, 6000 bp, Homo sapiens
tggaaagagatgcacaacagcacatattacattgtgtgatagacataaataacctcaagtatgtagataataggaaaatgtcataaaataggaagtgatgagttttgaatatttattgtcttttaaaataaaatatatttaactgtaagtttatataatttactttttaataatggctgtgtctaacaattaactcacaaaatttagctcccgtgtattcctgacccagcttgacttcgccagcaggctctgatcccacactctctaccacctgctgaacaactctacccggatgtcttccataagaaaccacaaatttaacataccgaaatctaaacatgctttcctctttgaatctcccagtgcatacttctcttcgcctcttgacttccctatttctattaatggtgcctctaatatccttagcaacccaatcagttgctaagtcttgaaggctctgcctatgttcttctgatctgcctcctccttttcattccacttacggttactgtcctaccccagacaattacctagcctcttccccttgtctcttctcactccaatctatctgacaatactgatagattaatcttccacacacacagctctgataatatagctttgctattcaacgcacatacatgaatccggccttcaaagctctccttgcttcaggcaatctggctagctccttctttcctgtgctgggaacatgccttgtggattctgattgtgtgattttgctctcacttttgactttctctggactgtccttccctctttatggaaagactcataacttttatacaagacagctcaaacaacaataaaaatatgtgggttggttgtcataggaatatgtaagttgatgagaatctggagagcggaaacaaacaagaagtgccaaatccaggaatcattttaaaataaaaatttatttggtcactatctgttatggaggttctatgaaacatactacactgttatggaggttctatgaaacatgctacactgaggtagcacttagtccactgtcattactaaaagattttctgggggagtcaacatgagatttatctcaaaactatggatttcaattatacatgccacagcttttcttcattaactgaaataattaagaattgtctgcattttaaccatttactgtaactatttccctcttaatgccctgagccaaactgggttgagtgggtgaggaaaggtgggtggtagagacatggagcccctaatctggtctgttttcaccattgatgagcctgattcatctttgggatgtggatcacgaggattaaagatccaccacgtgcccaggatttcccagcaattagaagcaaagaaactagaatttgtatcttttatatatattttgtccttcagcccttctccagtgcttagagtaaaataaaatcccttaagtgcttgcttttttcagcaggagaatcctaatgatgagcagcatgtgatcaagcgattccttttccttcaagctgaggttgaagttcagtagcgaaggaagaaggaacaggcagctacagccctctggtcagcagcaccaactttctcacggagttaaattagtttgggttatggagagcctgaatctttagcccaggagaggtgaaagtgaatgagggagaggaaggcggtgagagacaaatggcaaaggtaaaagtgggctgggtgcagtggctcacaactgtaatcccagcactttgggaggctgaggcaggaggatcaagcgcttgagcctaggagtttgagaccagcttgggcaatatggtgagacctcttctcaacaaaatatttaaaaattaactgggcatggaggtgcatgcctgtagttctagctacttgggaggctgagatggaaaaatcacttaagcctgggaggtggagactacaatgaactgtgatggtgccactggactccagcctgagcaatagagggagaccctgtctcaaaaatatacatatttttttatttttaaaaaaggtaaaagtgtatcaaagcagtctgccttcactctgatactgagattatcaaccagtgctctgcagaccttccatgaaaactactgttaaagatgcagattgttaggcctcatctcaaacctactgaatcatggtctctagggggacagcctgggactgtgcatctttcatgggtacacccagcaattctgatacactcgaaagcaagtttgtctaacctgtgacccgcaggctgcatatagccaaggacagctttgaatgcagcccaacgcaaatttgtgaactttcttaaaacattatgagtttttttgtggtatttctttaagctcatcagctatcgttagtgttagtatatttcatgtgtggcccttcttccaatgtggcccagggaagccaaaagattggacacttgggctctaaagattgaggatcactgctctagtgttggccaactactctagtgttggcctgcagactcaatacagcctttgagctaaaaacggtttttacatttttaaagggttgtaaaaaaagacaaaaagaaagacagacaaggaaagacacagaagaatatacaacatagcctacaaagcatttactatctggtcttttacaaaagagttttctgacccctttctagtgcactgcaaatgaaaggctgtacccaaatttagctccagtgcagccctgccacagctgaaataactgatgtagcaagcagatcttaaaaaaaaaagtgatgaaatgtgtaaagttgtcatctaaaaatacttttgtaataattataaatggagagagaaaatgtataaatacaaacattctgtaatgagtttaaaaatatagtttcatccatacaagaattttgataactccatttgattctgtttttccataagcttatcagatagcaatatatccaacattagcctaataaaattactgcatgtgaattctttattggactatgcatattcccaaacatattattgtcatacaactgagggaaaaatgtaaaactatatctgggaaatgaaaaattataaattctcaaaatgatacataggaaaatgatttacaaagaaaaaaaggaaaactgaacttagtatctttctactttaaaggggttcaagaacttaggagtagttacacacctcctaaaatcttgaaaaagaggctatgaactcacttcacaaagggttcagatactcacattgtgtccaagagactcagcaattgggaatcttgccagttagattcataaagcaatccgaaagccagaatgcaatttctttaggggtggtttctagatgtttattctagatatttttaaaagattttgtttatttttgatgtgaagaaagaaaattattatagaatctagaaataaatattggctttaaaagtattaatttgccttgtcctttgtaattgtgatccgaaatatctcacaataattttgtttcagtgttattttcttctcaggaggaaaggaatgttaaaaccttactagcaactaacacttgataaagatttaaactatataacaattttaaagaaagtctaaaacaccagatagtcttgaaacctcgcatgcttcaccgtttaataaaattatgactcattttagtaagaacatgcttttttagtaagaaaaaatgctttctgagctaagtttgaactgctggggcacatgggacacccacaaacccagtcagcagaagtctcaaactcctaaaagattaaaggaaaaatacattagtgtgtacagagaatgaaaaaaaaatccccaatggttctaatctataaacggaagtaaaactaaaactcccctaaaatccccccagtcatcaatccttataaattcagcacttatcttcttcctttacttctggagaccctcattaaacaacacgaaagcctttgctgacttttatctcgtaaaatagagccctcaaatgacactaagcagggataccgacctccaaaatcacaaactgttttacttctaaaaccatgcatgcaaacgtggggtttcctgagttctgctaggggcgggctgtctggacccccgtgtattttttttttttttttttttttttttttttttttgcaggtgtgcaatccagggtgcgcgctctgtgcagggaggggagcaaaggtgtgcggtgggcaccgcctgggccgggcggggcggggtgggtggggcccgggtgtgtgctggggtgagagtgaaggacatgtgacaatacgacggtggcggctgcaggatccgggaggggagtgaaagctccgctggggcgctccattagtgagcggtgatggttgccgcccacttgtattgaagcgtcctttgtcactaacaagttaaattagagatgttatttatttaagaagaaggaaaaaaaaccctagccaaacagcctatgaatacatatgctcacatcccctactcctccaactcctaatttccccgtctccagagggcacagttgtaaaccttgacgaaaatccaatcttctgtgcgggaatttccccccaccgcttgccgcccccgcgacagtgagtgggagctggaggagctctggtcccgctgcccgggagcacgcggagccgggcgaccgcggtgcggcagccagggaggaggggaggcggcgggactgggcgcgggtcggcgccgccgcgacccgggagcggggtttgctcaggaaaaggcgccgtcgcggcccccggccacccctccctggccccgggctccctgcccgcgcgcctcccgggcctcgcggcgcgctaggcgcaccgcggcggcgcgagcgccgaatgggagcggcgacccggccagcccggcagccccgcgggcggcagccagggcgaccgcggaggcggcgggcagggcgcgtgcgcactgcaggggcgccagatttggcgggagggggagtgtccaaagctctttgtttgatggcatctctgtttacagagtttacactttaatatcaacctgtttcctcctcctccttctcctcctcctccgtgacctcctcctcctctttctcctgagaaacttcgccccagcggtgcggagcgccgctgcgcagccggggagggacgcaggcaggcggcgggcagcgggaggcggcagcccggtgcggtccccgcggctctcggcggagccccgcgcccgccgcgccatggcccgaagaccccggcacaggtaacggggagccgggcgggcggccgagggcgggggcgcgcgggggcgcgcggggcgccaggctcccgggagcaggtgggaattcgttccgggatcatctgaggggctgtcagaccctccgaggacctggagcccctgcctcggcagcagaagccgctccagagactgatgaatggaagagtctttgcgggaaatgtatccggacgttgggaagcacgccctgcggctcattttgcaagttgcatggggatacatttttctttagggggaaaaagaaagcacgttccagccgagggcagagcggtgcccaccagccccggggagcccaccaggtgcctggcttgatgccgcgggtgtcggcgagggatccgcagcgtaattgctggatgcattgagatatgtttggacttggaagtgcagagcatatggcagatacagggaaaatgctggattgtttagtagctgcaggtagttcatttaaatttcattcattctttatggaggcgaggaccagtgtcagctgacaggcggctgaaaagcagattttagggggataaaggggtctctacttttgcaaattgtcttaagacctggttttggaggttcgaatcatttttctctgaaaggcttttacttccactgcaaacattgcacgcgcacccacacgcgccgccgtcgcacatgtcactgcacttagggaggctcgccgggaagatgggtgcagtcccttcacatttttggccggacagatgggaagagggagaggaggaggaggaggg

SEQ ID NO: 65 - DNA, 6000 bp, Homo sapiens
aaaagctccagctacagctttgttattcaggcctaggctatttggagtcttggttagaaggccttccactggcccttccagcaggctgatttagctttggtgactgggtgtgggctggatattaggcctcctgacctcctgtctcccataaatctgcacaagggccctcagcagccccagtctcctctttcctcccaagcctgcttagaagactagcctgtaattgcactccctattctttaaccagcagcaacctggtcccagtgcctaccacatgacctccatgctagggcccatggggtttggttcctaattacatgtccttgggccttagacattattacccatttctccactgggtttcaccttttcttgtccacctctatgtccctagttgctctttctgacatcagccctcttctcttctcactttatgtttccaagaagcagtctcacccatctgccagctttaatcacaccacctcactgatgaaccccaagttgtcttcagatctccatttcccaattcccaaggcctagcttcatgggcgtatgactggtgcagtggcacaggacaccatgcttagaaggttaagcattaaatcctccctggggatttaatgctctgtggtcgccatcttggaattcttaaacttctttgaaatttgaattggtattctgtaagtctatcagtctgctcaggccaccataaccatgtaccacagactgggtggcttaaccaatagaaatgtattttcttgcaattctggaaatgaaggccaaaagcaaagtgccagcagggtaggcttcctctgagggctgtcaggaaaggctctgttccaggcctctctccctgccttgcagatagccacccccatgctgcctcttcatatcggagtccttctgtatccatatgccccatggtgtctctctgtgtgtactcttcttataacaacagtcagattggggtagggcccacccatatgatctcattgaacctaatcacctttttcaaggcccgatcgccaaatacagtcacattctgaggtaccaaggcttaggacatatgaattttgggggacaccattcagcccatcgcagcaattgaagtcagatgaggcaatgaagcacgcgcttagggcttagagtcgtggctctctgtggccctgctttctgccaccttcccaggacacattctcaggtgcctccctgcctcttggccttctggccacccagcaaccccttccttccacacttagaaggcacatgggcacaggtgctgggaggaccagggtcaagccatcctagccccgggatgtcagtgccactgcatgtttggaggtgatttggcaggggcaagccttgcacccaccccaatccaggtatccagcatatcctggttgatgttgcaattccttgggatttcctgaagtccatggacctatggaaggctgtgggaaaggaaagtgacttcccccacttcctagccctgggtcattcagcctttttgagaatttgactaaagttagacaacctctctctaccctggaaagttgacatacatagacagccatgatttttatatatattaagcgggtgatgaacttcataaaagctactctgtgcacctcttgtgatttggccctgcttacctttccagcctcatgtcaactctgctttcaccatgctgcagccctcttgaatcagcaaagccattctctgaatgcattgtatccttccacgcgtgtttttgcaagcgctctttcctctgtctaccatatgctttccttcattagcattgtaaaaaacttcaaaattaaaattacattctgtcttcttagagaatccatgctgtcacctcctacttcctataacctaagttaaaccaagtgctcctctaggacatccatgagtctaaaaggtttataatactaagtttttattatttccttacctttgtcctttctacaggattgtgagcattttgaggacaaggactgtgttttaatcattgctattttcctggtgtctaggacagagctgagcacagtcaatgtttgcaaatatctgttgaaagatcaaatgaatgcattcctgaatgaacgactgaaagagaagtatgagcttgtggtgagctcattttggagccaaacggtgctgggtttaaatcctggctctcttgaagactagtattgtgacctaagggagattactctaaagcctctgttttctaatcttgaaataaggcaaatggaatttacctcaagacaaaccattgtcaacttatattgatgaacaacagctatagctacatataacttagtcctgtcactaaatttctgtgagttatcttggaatgaaaagacaaaattaaaagacaatgaagctgtattcttgcagattaatttattaagaacaacagtaaaaatatactcattgaatgtctactgggtagaagacattatgctaggacctgtggagaaattaaatataaattaatatttggcctatggaggagttaaggtatacagtataggctaaattttaaaataaagtaggaaatgtcaggtgccataagagaggtatcagattttagattaagagttcgtttgtagctgagacaatgaggaaggctttttgggacaagtggtgtttgaaaagacctttcctacaaaggaaaggtcaaaagatttttgctgacagtggaggaaggaagacaggaatgaatgcaaccatgaggaggtggagatatctaggagagaaatgtgggcttggccatcctattgatgtcattgtttcaccagatgctgcagtttcagcttctgaaaccaagggttagtgacctgcctttttcacaaagtacaatgtgccctggttttctgtctggagccattgatgctctgcccagaacaaggccacctgatgccgacagctaaggcagaaattggcctgttcacaccgtagcccctcagaagcagcagttttgtcactctttttcacaatgccctgaagacacttggcagaggctctactgcaggggtgaggaatcacatccctgtgaataggaatgagcaactggaactggtgtggacacttggggaatgattaataaatcttatcacagattgtcaaattatgttatttagaatcaaactgcttgtggatgaggcagaagatacatacacacactataaagatggttttctctaatgaccagtgatgatgagcttttttccatatgtttgttggctgcataaatgtcttcttttgagaagtatctgttcatatcctttgcccactttttgatggggttgttttcttcttgtaaatttgtttaagttgcttgtacattctggatattagacctttgtcagatggatagattgcaaaaattttctcccattctgtaggttgcctgttcactccaaatgcccatcaatgatagaatggataaagaaaatgtggcacacatacaccatagaatactatgcagccataaaaaaggatgagtttgtgtcctttgcagggacatggatgaagctggaaaccaccattctcagcaaactaacacaggaacagaaaaccaaatgagcatgttctcactcataagtgggagttgaacagtgagaacacatggacacagggaggggaacatcatacaccggggcctgtcgggggtgggcggcaaggagaggaagagcattaggacaaatacctaatgcaagcggggcttaaaacctagatgacaagttgataaatgcagcaaaccacgctggcacatgtatacctatgtaacaaatctgtacattctgcacatgtatcccagaacttaaaattaaaaaaaagaagaagaagaaaaatggtgttcaaaatatttcattttacaagtggtaatgaaactgagcttttaaaaaaaaatcagtgatgagatgtcatttccaggaatcctcttttggcaccaccagcttgagttcatcacactgccaccagcctgcatgggtgctgcatttcccctgctgctgtataatggtggttaaactatggttctggggcaccaggcttcctgaccttgaaggcaagctcctctattgactagcatatgaccttgggcagttcctttaaccttcctaagttacagtttctcatcagtaaaatggaaatggtggcaatacctgtctaatatggcatatggagagtagtaaaagaaatgactagtgcagtaaagaacatctcagtgcctgccacacagcaagtgctttctctccagataccagcgtgacttctttctgtctcatctcctttagatctttactccactgtgaagccatctttgaccatcccatttaaaaatgcaccccctacctccaaacattatcccatttcctcccttcttttttgtccaccgcacttcatcactatctcacatactatgtattttagttatttgttatgtttatgcctgtctctttagtagaatgcaagcaccaagcacctgtattcccagatcaatgcctggcatgcaataaggactcaagggaggaagagatgagccagccctgctatgctgaaactactcccggcccagtgctagccctttgggaccccgtttgaacgtctgactgccctttgacacctggaccagtgggcaggaagagaaactaaaatcgaggtagtaatttaagcagcacattatgggggggctctggccttactgaacttgaactcaatgctgccgatttttcataagccttgattcatgataccccactccctcttgctcagctaatgagctcctcctgttacccaaagttgacccgagggacccactgcagagcccgggatggcaaagaattctctgactcaggctctgacccggactcggaggggcaaagtgagcaggaaagggatctgcaaagctcacctcctcttggccaaggcggcctcgcgctggggaggcggctctcgcgctggggaggcggctcccgcgctgcagccctgctccggcgccccgcgccgcctccgctgcgggtcgggagcgcgcgtctccgccgcacctcggatctaggagctactcgcccggccctgggcggtgggaggcggcggcggcggcggcgctcgcgcacctcggaggagccaggagccggaaccagggccgagcccgcgggccggggctagccagccggtaaccacgggcgggacagggcgcccagggcggagcaaagcccgggcgctgggtgcggggcgcgtgcagctttggtcaaggcagggcttgcttgggtttgggggcagtctttagtttagaggggctagagaatggggtgggaggaggagaattggggtgtgaggacgcccacgggaagagtgtggaccccgtggagagcaccaagtttaaaaccttcccggcagcccgctgatgtgcgtgtggacgccgctgggcgtccgaaaagcctggaagcggcggcgctcggggcttgggtgggcttcctcccctccgctgggccccagcggccgaggcacaccctttcccgctggtgagaaaactttccttgctgcggccctcctgccgccttggtgccctgcaactgagagagcccccctgggctggggaaatgtgctggctcctggccccgggcgcgcctccatgcactgggcagggttctcagatgatgcctggcttgacagttgctcattcattttgtttggactggggagcctgctcgcaggtcgtgttactgattagagggaaataggggttttacactttccccgccgccccaccccgcaacccgcccccgctccccccgcccgccccgcgccccgtgccccgtgcctttcccatcctttctgtgtaattaattgaggaaggcaaagagtagtctctgcagaaacctgtttggaggcgttgtggtttccacagcatgttagatggcacagaatctcagccactactctgcatttagtttgacaacagtgaaacactctggtgttttgaaggcaaag

SEQ ID NO: 66 - DNA, 6000 bp, Homo sapiens
aaaagggatggaactggaggtcattatgttaagtaaaataaaccaggcacagacagacaaataccatatgatctcattcatgtgtgggaacttaaaaagttgatttcatggaggtatggagtagaatgatggttaccaggggctggaaagggagggggaagtgaagagaggttggttaataagtacaaacacacagttaggtagaaggagtgagttccagtgttcaacagtacagtagggtgactataattaacaacaatatattatatatttcaaaacagctggaagagaatatttgaagtgttcccaacaccaataagtgataatggtggctcacgcccataatcccagcattgtgggaggccacggcaggaggatcgcttgagcctgggagtttgagacaagcctaggcaacatcgtgaaacctggtctctacaaaaaaaatacaaaaaattagtcaggcatggtggtgtgcacctgtagtctcagctacttgagaggctgaggtggggggatcacccgagcccagaaggttgaggctgcagtgagctgtgattgtgccactgcactcctgcctgggtgacagagtgagaccctgtctcaaaaaaataaaaagtaaattgaaataaaaaaattaatttaaaaatgtttttaaaaagatagatgtttgaggtgatgggtactctaaataccctgatttgatcattacatattgtatgcatatgtcaacatttacatgtacctcataaatatgtaccattattagcatcgattaaaaattttaaaataaataaattagataagacttttaaaataatgctaagtccttttatcatttattcttatagtttgccatctgaaactcttcaactaggaactagttacattagagaatgagagatcagatataaggcctcaaaacctcacatgtgcccagggcttacggagggcccaggagcaatttctacatctcttttttgtctacatgggttaatttatttgctccctgaattgttattattaaaagtaaacaaaaaggaaaaaatggcatgagcaattcctaatgaaaatcaaattagctttagtgagcccctaccattccaccattaaatggataaaatagacagacagtacaagaaaatcatgatttttatttttaatctgactaaccacagttctttagcatcctgtatgtgaaattagtatcatggttacttttcccagttggccatttggcaggggatctaaatagaaaaactaagtatggatggctatctgatcatggaatgtcaaggaatgatggatttgacttcacggtaaaaaaatacagacattcaagtttccccaaattcttcctatgtagtccactgggatagtatatcttttctgcaagtagaaagcattgaaacaaagatcccataaacaaccacctaagctgggcacggtggctcacgcctgtaatcccagcactttgggaggctgaagagggcagatcacctgaggtcaggagttcgagaccagcctgcccaacatggcgaaacccctgtctctactaaaaatacaaaaaaatagcagggtgtggtggtgggcacctgtaatcccagctactcaggaggctgaggcaggagaattgcttgaacccgggaggtggaggttgtagtgagccgagattgcgccatcacactccaacctgggcgacaagagcgaaactccgtctcaaaaaaaaaaacccacttaaatgaagtcattgtcttttcacccatttaatcaggccttcattataagatatgtgggtacaattattatttttgtgttagagataaggattctgaagtatagaaaagttaagttactggccaggcatggtgcctcatgcctgtaatcccagcactttgggaccaacatggcaaaacggcatctctactaaaaatacaaaaaattagctgggcgtggtggtgtgtgcctgtaattcccgatacctgagaggctgaggcacaagaattacttaaaaaaaaccccgagaggccaaggttgcagtgagccgagatcatgccactgcactccagcctgggcgacagagtgagactgtctccaaaaaaaaaaaaaaaaaggaagaagaaaagttaagttacctactgaaggctcttactcccaaggccacacttttaaccactatgcaaagtgcctctccttttctctgacaagatagtgaagaaattaatagtcctcagtcctttcataagatataaaaagaaaacaaaaatagtacagcttttaaataactcttcactgtagcagttttcacaaacaggtctacttttagtataaaccagtatatataccagaatgttccaggcaagtggttttaactatttcacacttccatttctccatgttacaataagactaccagtttttacccctttcctacttcatataagtgtatgaagttgagtaatatgatgtcatcaaacatactttgagcttcttggaaaagtgatatgtaaacacaaagtagagtgtttataaaaacagtgtcaatgtggtatgtatccaatgtaaaatagatcaaattattttattagagattcggacaaaaataactctttaatcttatctattttttcatcattttgcatactgcctgtgtctgtggctttcaagggcaatctgaaagggaactaggtctgatacgtgttgattggattcgcagtttagcattctccttattgaggaaatactgcagtacccaagatcttggctgtttccaggttttggaaaaatctcaggtcaaaattgtgttgccagatgggattattacatagaggaaagttggctgtgaatttccatataccaaaggccatcctaactgtcttttatgaaggacccaacaggcttttattataattcaaaaatagccaggtcaccctaggactttttccagtgttaccaaaacatcacttttactgcccaaacggaagtaggccattacctcacagtagaaaataaaagaagctagcttgagaccaaggtagttttaaaaggcatgaaggatgagaaccaccattcttatttagtggctctggacagcgtcacttggaaacagaactgcctcatgcacagataacaatgcctgacacccattacactttacatgcacgttcacatctgccttttggataaagggcaagaagaaaggaacatttaccattgagaaagaattagaagccttgttagtctccttttaagacttcttcacattccacatggattaactgttagggagaaaaacactgcaaaaataatcagcaatgcatttcggaggctcatcagctcccggctgacagctcacgttagttggatgaaggctgtggataggcttttagatgtgctaacctgtaattttgtttctagagtggcccaaagtggaaggagttttcactccctctcaataagccctcttgtacggttgtgacctctggcctatcataggtttttgacgataaaggagagcccgggtttttgaggttaagggagagttccctgacatctttggggtgaagaagagatggagggagcaaagctgccaaagacctcctgtgacatttccactagtatccacctataagtaagtgctggactatgattccctggggagatcagtggctctaaagacaggcccctgggctctttcctggctctgactcagcttcaaacctgccgtgcaactgctcagagtctaaatgtcttcatttatggaactgaaataatcctgctaagattactttctttgcttcgtgatgtttgcctgagaataagtagctgggactacaggcgtgtgccaccacgcccatctaatttttgtattttttgcagagacagggtctcaccttgttacccaggctggtctcgaactcctgggcttaagcaatctgcccactttggcttcccaaagttctgggattacaggtgtgaaccatcacactcggctaaaatgttttgaaaaatggaaacattgtacaaatgtgagatgttgtgcaacatgtcactgaaacacggtggtataagagaagttttgggaaccagcagaccagaattaggcctgagaaaatcttacagtaagcagaccagaattaggccgtctgagaaaatcttacagtaagcagaccagaattaggcctgtctgacaaaatcttacagtaagcaggccatcttcccaggccttctcttttctccagataatgaagaaggctttttaaaagcaaagccaacttgatttgttaattgatcatccaacttcttaactgtctttttctcatggtaaaataccgagaacattgtgggtgaggagcaagtcgggaggtggaacccacccccgcaccctgcctccaatagattgtatgtgtgggtcgctattgctgggacccacgaaggctgtggattgaggacacagggtagaagtgggatcttctgcaggtcagtgtcagatgtgtctgtgtgatgtagtcatgggagaggcgcgagtcttgggcgggtgtatcttaggggtgtggaagtgtctgcaagggcctccgtggtatgtcatcacattatttatatcatgggcatgaccctgaacgttcacccgagagtggtgagagaaaggccaggatttaaatcagtcttgacagcgcagatgaagtttgttattgttttccgcccttcccgagggacttcggaaatggccccctgagaggtgaattcttggaaagaatatgagggcggttaaggcgtctctgtctcaaactctccggattttttgcagctaccagggactgcgagggtctgcgtcctgggtggaaggaagcggcgtcagtcaacttcctcgcagcggcggcagcggcgcgggctgcagcggagcgcgcgggtctgcgcatcccgcccccgggtcgggaaggggcggagctgggcgtcacccgcccccggcggtctcctcctcccggccgctcccccgagccgagcccgccgcggtcacagccacccgcgggaagctcgtggccgggaccccgaggcgggagcgcgggctgggccgggctgggctacgcgcacgggctcggccgccgcccctgccggtgagtcccgccgcgggaggcgcggaacgggtcgagttgggtattgggaccgcgaggtcggggagccccggggcccgagctcgggaggcggggacgtcaggatcgcggcgttggggagtcctcgcaccccgagctcagaggggaggtccagagtcgcagcgttgggaacctgaggccaggggccggagtttagggccccgatgttgagtctccgaatccaagcccggaaggggggacgacgggttaggatgctggggagccctggagctctgaacggctgtagtggggtggccaggactgcgatgctggggagtcatggagcctgagcctggagagctggcgggggtgtggggaccgcgatgttgggaaggctgagcccggagggcgggagattcaggaccaagacgtgggggagtccgacagggcagaacgaggggcgtcctgtccgcatttgtggggcgccctccgcagggcggaggggaacggaacctgggaggggagtgcggaggagaggaagcccggggcggtagggagagcccgaggaagggcagcccgaggtaggggaaccccggaaagagtagggtgggtctaggcatgtgctttcgccggggaaagatggagggggcttctctgagagggtgggcgcgaggagcggagttgtgatgggaaccgccggcagctggctaatgggcggatgctggggcttggctggatgggaacgccgcggtggggtgtcggaggtggctggtggggctggaacgctgggaacgtctgtctaggctatgagaacgcagcgccctcggtggaacagggtcgtagataactcgagagggaatctagtctagggagcaagaccgggcatccccagacggaggcgggtggggacctc

SEQ ID NO: 67 - DNA, 6000 bp, Homo sapiens; identical to SEQ ID NO: 66

SEQ ID NO: 68 - DNA, 6000 bp, Homo sapiens
gctcagccacaaaacaaaaccacttgcttggccaactgcaagaactataaaagttggagtaggggatagggtacaaaaggagtagaaggtgaaggggaaatggttggtaggggccagattgtagtagagcttgtccaccatgtgaagatgtctgaagttttatatcctttaagccaatgtttctcaaacttttccacttaaagtaccccaaggcagtggataacacaggcatgggaatagagggcagcccatgttgagctcaaactctctttaaaggtcttgtctttgaaatcatgtgattcttatattctactccatcttatgtctgtttgttttaatataaaaatgtttaccttaataaataaataaaaatacatttaaaattaaaataagataaatattttctgaatctctaaataaaatttaaagattacgtttaaagatgtatttattataaataaaattcaagaggtcaggcctggtggctgacacctgttatccagtgtttttcgagacccagacaggagggtcgcttgagcccaggagttcaagggtgcagtgagccatgatcacaccactgcactccagcctgggcaacagagcaagaccctacttcaaaaaaacaaatgagggccaggcacagtggctcgtgcctgtaatcccagcactttgggaggccaaggtgggaggataacttgaggtcaggaattcgagaccagcctggccaacatggtgaaaccccatctctaccaaaaaatacaaaaattagctgggcgtggtggctcacacatgtagtcacagttacttgggaggctgaggtgggaaaattgcttgaactcgggaggcagaggctgcagtgagccaagatcgcaccactgcatgacagcctgggtcaaaaaaaaaaaaaaaatgaggaagataatctattctatatttcttccgccctgtttccttacatgaatcccccatcccggaagttgcttcagcaggtctgaggacagccatagggatttaagcaggatagttatgtgataagatttatttctagaaagagccttctgacaatggtgtaaagaatggattggagatgagagaggctgaaggcagagagagcaggcgggaagctctgcagtaacccaggcaagagatggtaaaggtgaagcagataaagaagggaagagttttgagaggcatttaagaagtggaggccaggcacggtggctcacgcctgtaatcctagcactttgggaggccaaggtgggtggatcacttgagcttgggagttctagaccagctgggaaacatggtgaaaccctgtctctactaaaaacacaaaaattagctggcatgtgccacatgcctatggtctcagctatgtaggaggctgaggtgggaggatcactggagctcaggaagtctaggctacagtgagctatgatcacaccactgcactccagcctgggtgacagagcaagaccctgtctcaaagacaacaacaacaagtggaattagggtcaggccctgggcttacatctgtaatcccaacactttgggaggccaaggctggaggattgcttgagcccaggagtttgagaccaggctgggcagcatagcgagacctcatctctacaaaaaaaaagaatctaaaagaaaattagccaggtgtggtggcacacccctgtggtcccagctacttgggaagctgaggtgggaggattgtttgagcccagcatgtcaaggctgtaggtgagccgtgatcacgccactgtactccagcttgggcaacagagcaagaccctgtcttaaacaaacaaacaagctaaagaagtggaattaacagtattagaaaactgtcctggggctgggtgtggtgggtggctcaagccattaatcccagcactttgggaggccgaggcaggtggatcacatgaagtcaggagtttgagaccagcctggccaacatggcgaaatcctgtctctactaaaaatacaaaaattagccaggtgtggtggtgcatgcctgtagttccagctactcgggaggctgaggcgtgagaatcgtttgaacttgggaggtggaagttgcagtgagctgagatcgtgccactgcactccagcctgggtgacagagcaagactctggcccaaaataataataacaataacaataataataatttgcaaatcatatattatctgataagggatttatatccagaatatatagagaaatcctaaaactcaacaacaataaacaaacggtccgattcaaaaatggacaaaggacttgactagacattcgtgcaaagaaattacacaaatgatctataagcactaagacaacataaaaagtcgtccagcaagcaccctgctgtttaagtttcagccaccttctgactcacaccttgagctagaaccatccaactgcgggctttctgaattcccatcccacagaaatagagataacgaaatggttgttgctttaaaccactgaattggagtgattcattttgtagcaatagttaatggcacatagtaaaatgttaatatgtagagaatctgggtgaagggtatataggaactctttgtagaatggtcctctaccttgtgtatgacaaaggggtggggttacaaggatcatagcttcttctcaggattactcaggacagtctacaccacccaagtctatacctgtaacaatgaagctgagctggaacttcagaatgggaaagcaagataaactgagcgtgcgacttccctattgccttggtgacacccagataccctgcagatgcagttagaaacagctccagttgtccaactctgtggctagaaaaaagtgtagcctgggtttttactctcctaaccccttgatttgttttgggaattattgtctacaaagagctctctcctttctgataattgctttaggtggaagaagagaggatatgctgtgtcccctctcttttcttacttactctatttgtaactttcttcttttttccccaagaaaatgggcttagttggggtgctttggcaccaatagtcctgcggcggaatctgtgggagctagacagggagatttggaagagaatgctaggttgtgagctcttgcttttgagttgtttgaagagaatgctgcatctctggcatgtcaacaagcccagcagaatccagtaacgttcaccaagaaggcttgattagagctggttaggggatgatcaggatggttaggtgtgaagagcttacgctgattatggagggtatgggagtcacggggttggtacccagtgaggaaatttaccttagtagaaacatttgggatagtgtagaagagagaagagctagaggcgaggattcaggaaatagagaatgccagagtctcaattaacaggatggaaagctaaggagatgaaagacttataatagtagcatagtactaaaagacaaactatgtgtaaaggtattagaaatggggactgggactctgaggcagttaggccagagaaaagaagaaggaaaagatttgtcttcatttgattcaattacataagcatttctcagaatctgctatgtgtcacatgctgtggtggatgctgagggagctgatgaaaaagacagaattcctgcccaccagggtcacatagtctggagacacagacacgtaaacaaatgacgatagtgtaaggtgtgtgtaagaaaggaggaatgtacagggttggtacaaaggtgacctcaaggcatccatgggaatcagggctgagggaggaagagccagaagacatcagcacaaagagaaccaagatgctgaagtcacagggggaaagaacatactggagccccgggcagagcagtgctggacaaggacagcaagtgtggagaggaaagggagatccagaagaaccgaggagatccataacagcatgcttggaggaggaaattcgggaaaacgaatggacatgtcagagggagctagttatgaggaagtggactgcaaaccagatagtgagcaagatgaagaaatgaggtgtttatccttgcaatgggagagagacaataaggctgacaaaaactcaagtggtctgtggatagacgatttcgttagctcgatttaagggtaaagggcacactctctggtaggagatgaaaggggatgtttaaaacaggtagaaaaaaattgggccgggcgcggtgtctcacgcctgtaatcccaccactttgggaagccgaggcaggtggatcacctgaggttaggagttcgagaccagcctggccgacatgatgaaacccctgtctctactaataatacaaaaactttgccaggcattgtggcgcacgcctgtaatcccagctactcgggaggctgaggcaggagaattgcttgaacccaggaggcagaggttgcagtgagccaagatcgcgccagtgcactctagcctgggcgacaagagtgaaactccgtcccaaaaaaaaagaaaaaaaaatgaatttgggaattagagaaaaagactgtgattggaacccacacaccaagagaggagataaaacccagccttagctcttccatgtcgctgaaagagaagaaaacgtctctttttccttttccgtagccataaaagatgaaaatccgtcatccagctactgaaatcaggtgcacacggttgttcctcctgtgatgagacagggcggagggattgttaccctgttgccagggaaaaaggaaggggctgttcccagttgctatggtgacgaggtaggcgcgttccctcggtaccgccgcacacgtctgaagcggtctcttctcctcgttgctacggcaacgcagtgggcctgttcctgtcgccccccgcctcccgccgcaatcgctaaggcaaggtggaggtaggggctgtcctcccgcggctcagttgccttggagacggcgggtgccctggccccgccccgctcggactgacagcggcggccgcatcgcgcctgcgcagtgccctcgtcccccgcagtctctgtgcgttgaagccggagaccgcggcggcctcagcgaggaccctccgccccggagccgccggccggagccgcagcctctgccgcagcgcccccgccacctgtcccctccccctccgcctccgccggagccgcctcgtgcactgtgagtccgggccgaggcgacggacgccgtggggctgagtcagcgggaggccagggcccgggctgggggaggggaaccgggctccccccgcccctgcctccccacccgcactcccgcatcccgaccgcgccttccccgcgccggtcaaccccctccatccctgtcgccgggttccctccggccttggcggcccggcctccccagccactccccctccccttccctcccctccccttccctccgtctctccgggtccaccttgaggctccttccccactagacgtggccaccgcacctctgccctgggctgatattttctccaaactacctcccgtccgcccttatcccttctccctcctcctcactcctcctaggcctgacatctcccggcctctctggatctccccagtgatgtgccagaaaaagagtgacaggagagcgaggggagacttgggggagggggaacatcgggccaggcccagcctgggggcctcgggtttcttccccacacgctcctgcctggctggtttggggaagcaggtctggacagttctcactggctgctcagagcttgcagggctttccgaatagatttggctgggaagggttcagccccatcgtgatcatctagcgtttaatgaacgcggctagtgcctggtggccttctagtgggctgagctactgcccggccggtgttgcggagcggggagtagaagtagtggagggaagggagaagaggttgcgtttgggagctccaagttcctgcgcttccggtgtggtgttgtgaataagcatcttgcggaactctttaaaatgcttttttttttttttaaatcgcactacaaccctggtata

SEQ ID NO: 69 - DNA, 6000 bp, Homo sapiens
tggtgagcaggctgaaggggggtgacctctcaggaggacaccagactgctgcacacctggacaccggagagagcttacctgtgatgtcacccacgtgctggggtgactcagtgctcctctctcgggtggaagttgcgttcagtgctgccgcagttcctccaacgtctccatggcaacgttcacacggatttcatagaacataaggtgtttgagctggaagggacctcagagatcggctcctcctgccccctcatttcatggagaggggagcaggcccagacagggaatgccacgtgcccaggggcacatagcaagccggggaccccgcggagggcacagaccgctgagctccagaggagggtcttgggaggtgccctgggggcacaggccgtggcggctttgccactccctggcttgctaagagccccttgaagtccaacccagctctctgctgctcagccacagagctctcgctcgagtgcctggcgggaacaggagtaggcaggacagggccctgtcctcaggaggctcccaggctgctacagcggccatgcagccgctggggaagggctggagagcatccagggagccagaagtggggcaggaggagccagggcaggctcccttgagggtggggctccaggcagagtctggaagcctgaggaggcctcactcgtgcctgcgccccctctcctggcacacaagggccagcccgagggccccactctgggggcagagtgtagggaagaggctggaaaatgggggccagaaagagactgtcctgatccatggctcccaggggtcgttttggctgggggctcacagcacacatccttccagacacccaggacggtcagaaggaactggcaggagttagagggcacggtgtaaggatgccagggggccgggccgtcagaaggtaacaggagcgaaagtcccagagcaaggccccaaggagacccagggcgctctctccgctcgaggacaggaacccgtggagaccttcccctccctggaagagccagctctgcaccagaagggtggggggctgtagcacccctcccaggggaacacggacctcactctccgcccccagctcccagggcccatctcaaactcggaccctgtctcagggacctgccctggcccacaggactcctctcttctccaggtctgaagatgccaagaatccggacatcccaaggcctccctgctgaactttcccaccatgccggcccccgccttgccctcgccggcccccgccttgccctcgccggcccccgccttgccctcgctggctgcctgttctagtttttctagttttatttgttgttgttgttgttgttttttgagatggagtcttgttccgtcgcccaggctggagtgtggtggtgcgatctccgctcactgcaagttccacctcccgggttcacgccattctgctgccgcagcctcccgagtagctgggactacaggcgcccgccaccacacccggctaattttttgtatttttagtagagacagggtttcactgtgttagccaggatggtcttgatctcctgacctcgtggtctgcctgcctcggcctcccaaagtgctgctgggattacaggcgtgagccaccgcgcccggccttttttttttttttttttgtggagaccaagtttcgctcttgtcgcccaggctggagtacgatggcgcgatctcggctcaccacaacctccgcctcctgggttcaagcgattctcctgcctcagcctcctgagtagctgggactacaggcgcccgccaccacacctggctaattttgtatttttagtagagacggggtttctccatgttggccaggctggtctcgaactcccgatctcaggtgatccgcccgccccggcctcccaaagtgctggggtttaatccatctttaacccactgcagcatcccactggtctctgcccatgggcatggactctgaccctcccctccctgcctccaggcctacagcttctttcctgaaggtcctctctgttcctattatccctcccctgggtgactgcaacccccatcaatctcatctccaggcctacaggctccaccatccatcccctcctgccagtccccaatattcctgtagcacagcgtcctctgttgttctgctcaaaagccacgcacagctctctacttcccgctgtacaatttccaagctcctaggaataacactcaggtttcccttcccagctgaccccatcctaccttaccagcttgattacctcccgtttcctccaaggaactgggccacactttggccacctcggcacaaagtgcccatctcctagcactctcagcctatgcatattgactccctccacctggggactgtctttctctctcgtgtcggactctagctcaatcctcaaagcccagtgcaaaccctccctcccccagaagccttgccctcactactgatcacacttgccttaaatctttgttagcaaggacatgtcctcctgaagtgaggcctgtgtttctaagtcacatttctttctcttttcttttctttcttttttttttccccagagtctcgctctgtcacccaggctggaatgcaacagcacaatctcagctcactgcaacctcctcctcctggggtcaagcgattctcctgcctcagcctcccgagtagctgggattacaggcgtatgccaccaggcccagctaatttttgtatttttagtagagacggggtttcaccatgttggccaggctggtctcaaactcctggcctcaagtgatctgcctgctcagcctcccaaagtgctgggattacaggcgtgagccaccacacctctttcaccaatttaataactgcttatggaggcccagagctggctgctggggacagcagttgaccaagacaagctgcttcctgtgcccggagagcttacactccagagggtgaaacagatggcaaacacagcaaccaagagacataatgatcaaagattccgaggcctgctggaagccaagagaggggtctgtgatgcaggcacccagagctccccattttcaagagaaaccagagacttggatttttatgtaaactctcctaattttaaaggttgccagcgcaagcccgtttcctctgctctctcaaggctcccctccccgcctggcctcccactttctccagcgcgcctgcctccttctcttcctgggggccccatccgcactcctccccctgcaggatgccctacttgcacccaactcctcctgctgcccgcgccctgggggtacctgagcagcagctggcaggacggggtccactggactgggagtccactgcccaggaccctggggccagtgcacagcagctgctgaggcccccagctcagaccctgggccagccatcctgaaagaggccttgtagcgcgggtggacacctggagtccccagggctgcagctgcagaagctaaatgcctctacccaggcccagtgcacacacactgggggttggtctggaagagctggggggccagaggagtgagacaaggaagggttctgagagggcttccgggtttgacccccagctctgccaggttcctggggattaagtctacagggatttctgccatgggacggtttatgttctctggagctggagatcacaggaacaaatcctagctctgcccttcctagcctgctgaccttgcacaggctccttgcctttctgggcctcggtttccccatctggacactgagggcagtacccaccttgcaggataactttgaagaggtcgtgtgcctggcacacaacagtgcttgctgtagggcaggcttccacggcctctgccaggccctctcgaggaatcactctgctgggcagtgccccccatctgtgttttctcaggcctctgacccgagaggcagccaattgtttggactctgggcactgccagctgggagggctcaggtctctgaagggcccaaggtcctggtgacagctgtcaggtctccggggacagctgggtcatctctccagctcccaaagaaacaccaagaagcccctgcatgccaaggacaccacccctctggaccactgtgccccagctctgaccactgcagtcccatcttctctgtgagagggggtgacagagctccagtgcagcccaggttggggaggtgggtctgccagggaccagcttaggatttggagaatcggccctggccacctgaaggtccgaacctggaggagaaggacaaggggccagccacacagcctgggcaggggcctctgctttccacctttcagaccctgagggcagagtcccgtgggaggggaccctcagggggccgggggctggctgccacagcgacttcctccttcccgcagatccccaggcgtgcacagcaggcagaagctgtgggggagatcgcagcgcccgctgtgtcctcccggtgaccagctgtcacctgagcccagggcgcctgccccagcagcctggtgtgtttgccaagccagggctggagcttcctggacccgcctaccctggaggggatggagcagtgaagggcaccgggccaagcgctaggcatctggggctaaggagacagaagcccgcggtgcccgtccatgcgggccctctgccccagcacccacatctcaggacaccccttcctcccaggtctggcggtccagtttgggggtcaccgagctggggtggtgtgcagccagcagaggggattcaggatcccggggtgactcctggcccaggcctgtcaccccacagctggctcctggccccaaggcagccacgggcaggggtcgtgatcgggggcgggacggggcccggacctcctgaccgccccccaccccccgccgagcgggggtgtatttgcatgtccccgccccacgcacggcattggcggcggcggcgggaggccgggcctgagtggctgcgcgcccgtggagcggcgggggcggggcgcgagccgggcgcccgggatgatgccgccgccgccgccgccgccgccgccgccgccaggggaagggttcgggtccgggtcgggctcggcgggcgcggggtgcgggacggcccagggcacggcggctgcagcgggagcacactgagcgcccgcccgccatgtccaggaagaagacccccaagagcaaaggggccagcacccccgctgcctccacgctgcccaccgccaacggggcccgaccggcgcgctccgggactgcgctttccggccccgacgcgccgcccaacgggcccttgcagcccggccggccctcgcttggcggcggtgtcgacttctacgacgtcgccttcaaggtgagccaggcacccgccccccaggccagcgcagcaggtggcgcccggcctgagccaagggttgggggtcggacagggggtgcagggcccgcggccccagggcgcggagccgacgcgggaggaaccccgtggggcttgcacggtgcatcgtgcacacacagctgtccatcccaggtctggggtatccaacagctggcagggcctgtcccccaccccccaggcggcatggtggcacaaggggtcccgcgccccagtgccctggcccccgcccggggtctcaccatttcccgtatgctgccctccctcaacccagcggctgtgggccttttttttttttttttttttttgctggggggaagaggtttgccagatggatggggaaccctgggactccagaccaaggcagaggctgtgtggacttggcagggggctgggaggaccattttgggtttggtagcacaggtttcggggagaaggcctgactgctgcccacttgcacctccccccaacctcagacttggcccaggtccctcttcagatcgagatctgatcctaatggggcaaattcctcgagccttgctggggtcatgtccctactgggatgtggagaagcccccggcagaggcctccccaagtctcttaggaggtacccagctgccaccccac

SEQ ID NO: 70 - DNA, 6000 bp, Homo sapiens
tgttctagggtaatctattctgtgcctgtagcctgggaccagccttcatctctgtccggtgggtacttttgtctcttgagcctgtggccttgggccagcctatatccttgtatccatgaacttacagtgactctctcagagcattctagcaacaaagtgagtatctcttttcttatcatctcatttcacatttttcttaaagtagatgagaagcctgtgtctgtaccagttcagccaactgccagaatggaatggacttctttcccttcaaatatgaccttgaaggtctggatgcatattggcaagggcatggaagtgattcaagaaatggaggaaaacgtgtatgtgagattcctcgtcctcctccctaaccatcacctgatggttgcctgacattccttggcaggggtgagggggtctcctgccctgctcatgtctgcctagctacctgcaataagagactgacagcttcagggtggggctggtcaccatagacagaggcatgattagagggttgggacttagctccaccaccaacctaccaagaggggagagaagctgaaggttaagttgatcaccaatggccaatgacttaatcaatcatgcttatataatgaagcctccataaaaacccaagtggcctgggttcacagagtttccataccacgtggaggttcctggggggtggtatgcccagggagagcatggaagctctggcgccccttcccccataccttgccctgtgtatcgtctctttatctgtatcctttgtaatatccttttaataaactggtaaatgtgtttccctgagttctgtgaggtgcttcagtaaaccaatcaaacccaaagaggaggtcttgggaaccccaactcaaagctggtcagtcaaaagttctggagggccggacttgtgactggtatctaaggagggaagcatgattcttgggttgtgggccccaaagtggcaggctctgacaccatcttcaggtagacagtgtcagaattcaattggaggacacccagttggtatctgctgcagaagtgattgcttgctttgtggtggaaaggaatcctcaggaaatgcagaagtcttctgtgttgattgttgtggtgtgagaacagaggaaaaccggtttgagagtttttcccgaacagtaactataatgtattgagaaaatgggacaccactgggagtgaacagaggtgctgtgaatattcatgctgggataacagggctctcttggctgaaccaggaagtatagtccccttattctgtgggaaatgctattttctattattatcacttaaaatggaaaaagtctaaatctgtattatcaagagcttattttaaaatttcaaaagttttcagttgatgaagggttgaggagaaaagtcaatagtagagttatggagaaaaaattctggaaaatatacatgtcagaattcaaaccaaattccggagccctgaggtccacatccttctgcattgtctatgaatcattactgaaaagctgtgttctgtaggggaagatagctcaaccagcttagagctgttgattctgcagtcaacttctgattccttccgtgggtcttacactcgaattttccagcagagagattaattgaccagtgactatcaagaggaggctgactcttttgagctgccaccccatgccattggcatggctggcatccacttctggcctgaccagcaggggccacaatggtagggtccttggcagagcacatggctgccccatggaaggagctgccatcacagtggttaaaggcttaaactctaattggacagacctgagctcaaaatttgtctctgccactataaggtttgggctttaggcaaattagctaacttctctaaggctgtttgcttatctgcttaatgtggataattatgtatcatgagactgatataaggataaaactaaaccaggtgtggaatacacataacatggcacctggcacataaaaagcccttaacaatcattccaagagcctcatccctcctcagggccgtgggcacggtcagcttcccgtgaggaatagtctcctcttctgccacttgttaaggctgtaaggagagggtgtggggatttggtgattttgaatctgatctcttaatgtgtattcacatcagaacacaagaatatgctgcgtttgtttgtatgtttgtttgaaagattatagtttgaaatactctgctgtatctataaaggaaatccaagttaaactacctgaacagtagtgattttgttaaccttccctgtatctgacagtgtgctgggtgacagaagacccctcaggagcccccagctctaccccagcctccaccactctccaccacttattaggtgggtggaccaggacagtcatttaacctctctgagcttcatctcctcatcttcaaagtatgataatgaatactaattatgtcaccaagtggctgcaagttttaaatataatgctgaatgggtttttgttgttgttttttgtttttttgctggggggctagggactggcatataggtcctcaataaatattaggtttgttttccttttcttttcaaactccttttgggtttaagtttctgtggtattatgatgtctgtctatctgtctgtctatctatctatctatctatctatctatctatctatctatctatctatcttggttttcttccatggttcctggctcataactcccatagcccttgttacagtcttttgttatgttaggtatgttaggcttcaggaaaccgaatctctctggccttctgccctcctttcacctgctttaaggcaggactctaatcttcccccgcctttctttctttttttttttctttaagatggagttttgctcttgttgcccaggctggagtgcaatggctcgatcttggctcaccgcaacctccgcctcccgggttcaagcgattctcctgcctcagcctccctagaagctgggattataggcatgtgccaccacgcccggctaattttgtatttttaatagagatggggtttctccatgttggtcaggctggtctcaaactcccgacctcaggtgatccgcccacctcggcctcccaaggcgtgagctgggattacaggcgtgagccaccgtgcccagccgcttcccccgcctttctgattataggtcttaagaccctcccaagagagggtcctcccctataccctgggggaagcaatgctgacatcacgaagcttccataaaagcccaagaggactggattcggggagcttcgggatagctgaacacgtggaggttactgaagagtggtgcatccagggaaggcatggaagccccacgccccttcctccacacctcatcctacgtgtctctttatctgcatccattgcagtatcctttataatagaccagtaaatgtgtttctctgagttctatgaaccactttagcaaattagctgaacccaaagagggtgtcgtgggaactcaacttgaagccagtcattccaaaattctggaggcctagacttacaactggtgtttaaaggtgaggaggcagtcttggggactgagccctccacttgtgggatctgatactccaggtagatagtgtcggaattgaattggaggacacccaggtgcggtccactgctcagtgtgtggggaaaaccccacacacatctggtcaccaaattattctcctgtgttgatgattgctgttgtgtaagagtagaggaaaaatacggtttgagggaggtttttttttccccacacagtttcaaacaaggatattggaccagatgaccaacattaaaatctctctcatccttaatattgcatgaagctgttcagacagtggttggagcaatgatttctcttagaccactacattgattacttttctctttgtcatcttctcactccccccgttttctttctgttctcctttctgttaacaagagtggaaatcacttctattcatgtacctcctcccaaccccacccccaaactgactactccatccatccaactcactgttttagctacatctaatttataaaattagatggctaatgagatgtcatagcctaaaatcgactaagaaattgattttctttctgtattattgtacccagacaacaccctgcttcctcagtttagaatgttgggccaccacggttcctgactggataccacgagctaggtcctacaagggagagagctgtttctggcttaaatgatgagaactagggcagagagtaaaggatagccagccacagctaaggaatgcagtcagttagaagccaaagtccccgtgtagtgttcctcttttctactgtgcccatagcggacactgattgaatgcattttgttctatcgtattcagttccacagtgctttgcaacacccatcttataaatagaagttgggctgaggatggggccaaagttaggggtggtagttcataaacacgtagtttttgagcactaattttaagtaagaccctgatattaagaaataagggggattaaaagatgggaaattaggcccaccaatacatgtttttctatttcccaatatatcaaaatattatcattttaacatgcaatcactaaaaattaatgagctagttaacattcttcggactctttggtacctaggtgtatttcacacttacagcacgtgcacgattcaactcgaactagctacctttggagtgctccttagccacacaagaacagcgttgttgtcaagatgccagacctttgatttgtggccctccggggttgcaggcgttaacctggggccagcatgggtcgcgggtgggacagtcggtccggggactgggcggtgggagcacttaaaccccgccctgcggagtcgccgggagttgtagtcggagccccgggagtccgatgggagttgcaggcctcagccccggggagcacgccgggagttgtagtccgcccccgccaccctcttggtgtgcgcgtcatggccgtcagcaccgcgttcccgtcctcttccgcttggccccagaaagtttcggttctgcccggcggtggacccacgagcgcgtaagtgccgcggaagaccggctggactctgggggcacctgggtcgctcacgatccctgaggcgagagcttcgctcggggcgcggcttgtcacctgttgcccttacagtccccgcccatcccaggtctccctcagaccctgcccgagcgcccccgtccttgcccagcgggccgggaagcacctcgggcaggtggaagccggcccaggcacccagcctgcctctgttggtcggttagaaagacagaccccaaacaccagttccaagaccccggagggcggagggcccgcaaaggaaaggagcccaccatgcggcgtctcagaacaagcctgaatgtcttagcgcaggatggggcaggccccggagttcctgcctgcgtggtctttaggaagtttagtctctggcccagttgggccgggacagcccagaccttcactttgcaagactccgctggtgctcggatctctgccctcttcccaggaggggaagaagcttctttcttcctggcccatcctttggccaagacctattcactatccactgccccttgtgcccatgcgcagggtctcgagctagcccccaggggtcttttcccgaaacacctgttgtctctggtgtggcggcactgcactggactggagtccgtgctgttgaaacctggcgggggtggggcggggaggggggaggatggcgggattttattttttgtaagaaaagcacatgtggttgacacgttaaccgcgtggccccctgttaaagcacatgtattctctgatgtccctgtcactcttcactgttcccattgggtgtcctctccagaaaaaaaaatagaacacttgttgaaactgcctgtgttggccagagcctctcagcccctctgcttgtcttaccacagcagtttcctttcccgacaga

SEQ ID NO: 71 - DNA, 6000 bp, Homo sapiens
gaggtcagaattttgagaccagcctggccaacatggtgaaaccccatctctactaaaaatacaaaaattagccgggcgcggtgacacatgtctgtaatcccagctcctcgggaggctgaggcaggagaattgcttgaacccgggaggcagaggttgcagtgagccgagatgacgccattgcactccagcctgggcaagagtgaaaccctgtctcaaaaaaaaaaaaaagtgatggctgagatgaaccttgagataggtttctgttataaagtgcaatgctctagttagtatagagaggaaacactgggtggtagtagctaagcaagtgggatcaagggctgggctcttctgtttaacagctgtgcaacctcaggcaacttcgccttctgtattttggtctttttgtctgtaaagtagggggtatatacagaatttacatcttaatgttgttatgagtactgatgaatatagatacaatgtttagaatagtttaggctattttagtttagaaatgtttaggctacgaaatacacgggtagaatttacagagaggcagagtactttaaaataattaaatcaccaaataaaataagacaagtctgttacaagaaatgttcccaaagtggccagataagcatctgtcaggggtgctgtaggaaggtctcccactctgatgagaaggttagattagaggatctcttaaagcctaggagtcattgatagcctagttatgccctgaatgcttgaagttatatttatgcttatggagtaatctctagaaaaatctgattttattatactacaaagccataagtaatttttttgcaacttgtagagttctcagactaaagtcaaatgaaaccaaatcatacaaaccaaacttaactagtgacgatttttggtatgtcaattcacaatgttaaacagtaaagtaacagaaatccagaaatgtaatattatttacccataggaaagtgatctcaaaaagccaagagaaaatgcctcctaagggtccttgctgcaatttgatctcaagaaagcagagaagaaaattctaaaaagattatttcatttaaggttaaatgattatggaaatataaaattctcagtgttggtcaaacacaaaacttgcaggtggcttagaaagtgcatacaattctcaaaatgtattccctaccgttaaaggtatttatatttatagttatatttttctagctatattaagcattatttttaaaacacattacagtaaaatacacataaaaggtacatatatattacgtatataatttgagtttttacaaactaaacacacctatgtaatcagcacccagattttaaattgtttttgaagttaatttttcttacctttcaggaagaaaaatttaacgttctattctgcatatttggaggtacactatgtaactttaaaagcaacatacccatcttgacttcaagtgactttcttttttttttttttttgagattgagtctcgctctgttgcccaggctggagtgcagtggcgcgatctccgctcactgcaagctccgcctcccgggttcacgccattctcctgcctcagcctcccgcgtagctgggactacaggcgcctgccaccacactcggctaattttttttgtatttttagtagagacgggttttcacaagtgttcgccaggatggtcttgatctcctgacctcgtgatccacccgcctcggcctcccaaagtgctgggattacaagcttgagccaccacgcctgacctgacttcaagtgactttcaatacctcttgtggtaggcagaataaatagctccccaaagatatccacatctttttttttttttttttgagacggagtctcactctgtcgcccaggctggagtgcagtggcacgatctcggctcactgcaacctctgcctcctgggttccatttattctcctgcctcggcctcccaagtagccgggactacaggcgtgcgccaccatccccggctaattttgctttagtagagacggggtgtcaccatgttggccaggctggtctcgatctcctgacgtcgtgatccgcccacctcagcctcccaaagtgctgggattacaggagtgagccaccgtgcctggcctagatatccacatcttaatccctgaacctgtgaccatgtttccttacttggcaagagggactttgcagatgtgaccaggactttgagagggaaaattatcttggactattgagtggacccaatgtaatcaccggggtctttttaagtgagagaggaaggcagtagagtcacaaaagatgtggcaagggaggcagaagtcagaggtgccatgtgccaaggaatgtgggcagcctctagaatctggaagggggaagaaaatgaattctccctggcagcctccagtaggaaggcaacccaactgacaccttgattttggtcccttgaaacccattttggatccttaacgtccaaaactgtaggataatacatttgtgggttttttttttttttttttttttttttttttttgagatagagtctcgctctgttgcccaggctggagtgcagtggtgcgatctcggctcactgcaagctccgcctcccaggttcacgccattctcctgcctcagcctcccgagtagctgggactacaggcgcccgccaccacgcccggctaatgttttgtatttttagtagagatggggtttcaccatgttagccaggatggtctcgatctcctcaccttgtgatccgcccgcctcggcctcccaaagtgctaggattacaggcgtgagccaccgcgcctggccaatttgtgttgttttaaagaccctaattttgtggtaatttgttacagcatatgtgaaactaatacaccatttatagtctggtgagtctgtcttcagattcatatatctcactgcacatttaatagcttcatgtggctcacaggcatctcaatcataacatgccctaaattaaaactttacttttttcttcccaaaccaggtcactctcccagcctttctcatcttagcacacaaccaaccacccaattcctaatggcagaaacctggaagtcatttctttctttctttctttttttttttttttttaagagatgaggtctcgatccagcacccaggctggagtgcagtggtttgatcgagctcactgttgcctggaactcctgagcacaagcgatcctcccacctctgccttccaaagtgctgggactgcaggtgtgagccaccacacctggcccggaggtcattcttgagtctttttccctgtcatccccttatatctaacctataattaagtctcatcaattttacttccaaaataaacatcatatccatccacttcagttgagtttcactgctaccaatccattctccacagagcagccagtgtgatttaaaaaagaaatctgggcctggtgtggtggctcatgtctgtaatcctagcactttgggaggccaaagtgggcggatcacctaaggtcgggagtttgagaccagtctggccaacatggtgaaacccccgtctctactaaaaatacaaaaattagccgggcatggtggtgtgtgcctgtaatcccagctactcgggaggctaaggcaggagaattgcttgaacctgggaggtggaggtttcagtgagctgagatcgtaccactgtactccagcctgggcgatagagtgggaccctgtctcaaaaacaaacaaacaaacaaaaaagaaatctgatagcacttccttgcaaaaatcccttaatgtcttttcttttgtggctaatgtgaccttttcgtggctccaagctagccacaggagaactaagagttcataagtattttacaaattagagcttcattattaattgaaatgcatcacaaactgcagtttgatgagatttgaaatttgctgtacagcaagaaatctcaatgaactgttagacttagtttcacctgtggtaaatttttaatggttgtaaaaaaaaaaagatgttaatattttgtatcatcaacttcattcaaagtttcttgtcaatggtgactcaggaatctgttgcccaggttggtctcgaactcctggcctcaagctagccttctcacttggcttcctaaaatgctgggagtgactcagaaatttgaaagggtcattaaaaagtcttaaagcctgattcggtggcatggtcctgtagtcccagctactcagaaggctgaagccagaaaagatggcttgaggccaggagctcgagtgctgcctggacaacatagtgagacccttgtctcaaaaacaacagcaacccaaagtcttatttatcttcaggagctgcgcaagccctttaccaccgccacgtttctccctggatgtccctaggcctcgggactggctgggagttccctgtagtggaggccgccgctgaactgattataaagatgagagaggctctgccatgccttggtcatcaattcacactccaccagtgtcttctagcagtcacggcaagggttaacgtcagggaccgctgtggggtggccgcgctacacgacagtatagttgcggtcctggtttatgaaataactgagggaacaagaggcgcaagaaatccctccttgggtgcaagaccaaaacaactacccagcgggaagactcgggcttcagtgcgtgtgtcgccagtggaggaggacgcttcggggcgggagcacaagctggcaggacagccccgcagcagctccagcgcggcagaggccatggaagatggtccgctggtcagcaccctgcctgcgcctcaaaataccgccgggaaggtgggggacggggacgggagcagccaatcacgcgagctctctcgggtggcgtcagggcgcgatcgcggattcggcactccgggtgggcgtggctgggcgagcgaggagtggggacaaggtcgagcgacgagtcgtctacccgcgcgcccgagcgcggaaaccgaggggcaggctcgcgctctgcctgcttcgtggcgcttggttcgtccctcgcccgaggagcgcggtggcggcgtgggagggagcctctgacggcgtctggtgagagccgcgcggcggcgtgggactccgggagagcatcctgcccacccccagggccgcctcccccggcctcctgccccaggcctcccctccccggccgctttccaccccaccgcgccccgaggcccacactggacccggctctcgcccaatgtcctgcaggcctcaccatagggcacctctttggcccaattcagggctccgccgtgtggctcggggtgggccctgatgagcaggggaggggatgtagagggaggcccaggttgacttgtcccctggaacagtgctgtccaatcaggggggatgctgactgtcccgttaggagcggggcggggcgagagagggtggagaactgcctggcaggcgagctgtcctggcgtgaaaaggctgggctaaaaggtcccctccctgctctgagtctacattctgagtctgggcttccttgtatatttgagaaacgttaattccccgccctcaccccaatttttttttttttttttttttttttttttttttttgagactgagtctcgctctgtcgcccaggctggagtgcagtggcgcgatctcggctcactgcaagctccgcctcccaggttcacgccattctcctgcctcagcctcccgagtagctgggactacaggcgcccaccaccacgcccggctaattttttgtatttttagtagagacggggtttcaccatgttagccaggatggtctcgatctcctgacctcgtgatccgcccacctcggcctcccaaagtgctgggattacaggcgtgagccaccgcgcccggcccctccccccagttttacgcttgtaaaattgttagaacacaagaacgtattttttactactctggtaggaggggtggggtacagtttcgcagtataggtaactcgttaacccaactgt

SEQ ID NO: 72 - DNA, 6000 bp, Homo sapiens
agttaggcttctctcaatcctctttcctaccctcgacgtttgaatttccatgtcaaatgtttgcatcagcccaattttattaagaatcctgctaagtttgtttatccagaatcttccagcctgccttcagtaagaatcttgttaggtaggtttagccagactatccccttacctcagaagtttccttttagtaattttccattcatctaccttcctccactcccactccttagatataaattcccacttttcctttttttttttttttgcatttgaagttcagcccaatctctttcccctactgcaaaacccccttgcagtggtaactatacctactgtgatagtctgaataaaatctgtcttactatacttcagcaagtatcattgaatgagatttttttctttaacattatccttgtccctggaaatactacctcaataaatcccttttccatacattcttgtcttagggtctacatctggagagtcaaatttaagacatatgataattaacacagtgatagctatgaaggcagcctaggaaagctgtgtaaaatgagaaaaaaaggcaacctaagatggaatcctaggttgaaagcactatcacttaccacagaggcagagaaaaaagagaccaggaatgatactgaagaaaagaggcagaaatgttgtggaatgggtgaggtattgtgaatagaaagtgtggtatcagacatgaaaaccaacagagagaatttcaggtcaagagtatgaaattatacagagaagtcaagttacttcaggattacaaagaatcaactaaatattgcaacaaaggggcctcattataccctattaaagattgggcatttttaatatttggaaagtcaagactgttaataccataatattgtttttttttttttttaaaaaaaaggtatttttgagcacctgttgtggcaaaaaccctgtgctagtgatacagtggggggactgaatgacagtccctgccaggaagggtctgacagtctaattacagtccagtgtaataagtgtttgcaaagttgaaagtcaatgaaaatcattagaggtacacagaagagtcaaaatctgttattttctttattaatgactctataaccttttatacaattattgtgtattatacatcttatttaatgtaccttcctactgcaattcttttagcagagtgtcagggaaacatgtatgttcatggagggtcaagcatgctgaccaatgtacttgcaagtaatgcaaaagagacatttcttcattgtatggatatcacttgttttcttatttatttgcacatttatttttatttttaggaaaaagattctttcagcacatgatgaaacaaagaaaatatcttctgttgttagctttgcttttatgaatagtttgttttttaactgcaaattcatcttgcactaatggatggtctggtaaacagattatctgctcatcagtagactgtctggctctatatggtttagttatcatagtttggaaaggcagcaacttgctgttacttttttcccctagcctccaaatctgcagtgaagagtggcttcaacacagcacctgctaaaattttcacaggaatctgctatttactgatggactctgcactttggggagctatagagataacattatctcttcgctgtttcttatcttataactttgtagcagaggaaatcaatgaatgttagtatctgttaatatctgcctttgttaatgtaagcattagaaacttgtactttctgggtgaaactactgaagtcttggatttttttaaattccaagttgccaaagaggaaagagggagaatacttagtcattttatatccacagccctctaccctgctccttgcttgtaaatccccacttggccttttaagagttgaaatagagtccaatctctctctcctcctgcaagacctggttgcagtggttctgatcaccatggacccccttgaataaagcctgccttattatcttcaacaactttaatgactaactttttattcactaactctccctcttaactttctctaccatgttcatcagacatgcagttagtaaggcatgtataatgaaatgtaaatacatttggcactaacatccagtgttattatgtttataggtctacatttctacactttttagaatttatctctattttgtagctattcctgaaatgatgttgaagtagaacaacaacaacaaagtctttgatctgactattttttttttttcagacagagttttgctcttgttgcccaggctggagtgcagtggcgcgaattcgggtcactgcaacctccctccttctcccaggttcaagcgattctcctgcctcaccctccaaagtggctgggattacaagcatatgccaccatgcccgactaatcttgtatttttattagagacggggttttgccatgttggccaggatggtttcgaacccctgacctcagatgatccacccgcctcggcctcccaaagtgctgagattacaggcgtgagccactgcgcccggctaatctgactactttttaaggaggttcaaacttcagaaataactgtaaatatttgttcaaataagagaaatatttagtctaaaatataaatcaaagaaagggtacgtacagattaagcagtgtttgctgtaaaaaatgtacacatttattgtctaataatacatcagtattaaaactcagttatgtttcctttattgtactccacaattataaccatttacaattattggtagtttaaataactgagataaatactgtaattatgtagacttcattacttgaatatttaagaaacaattttcttcccagatgtaaatttttatattacctttattgttttaattttactttttctgtttcattcttagattcagggaaaaatattaaattatttcattatcaccttggagccacattgctaaatagttcagatattacaaatctttagccaagaccaaattgtgttttttttttcaatttatagcccaattattaatatttagagaccatgtttcttttatgcagttcttggtatcatctttttctatagcactacattttacacagttatttcttgccttttacggctgggaatcaaaacacatacgaacttcaattttgttgtaataaacgttaaaatttgtgaacatttttagtacttcagtaaaaagctcactcattggcagaagcgttccccagatcaggaaaaaaggaattaggattatctatgaccacaaagtaacattaattaatagcagtctttgggagcaagcagcagcgcctttaaatcttagattctcttgtgtctgcaaattatcttttatctttcagctgtgaaattttgtctatgaagtaataccacgagcaaattagcaataggattgcaaggtttttatagtcccgtgctgtagaacaattggcagtaatttgaaaaagaccgtccataacgctgtttttggtctgcggctaaatttgcaattgcatagtttcattaaggagaactggaaagagggcccagaagttgttctagcaatcggcagcagtttatctattttaaatcgtaatgcatactttttttttcctcctactgaaaacaatggcagatatgctaaagggaaggacacattcttgaactgctaaatggtttttccagatagccatttacggagtgcactcaattgccactatctggctgaaagcaaaagcacacacgacggccccttttcttttttccctttgcaaagcgaaacagtctagacgtgttcacgtgatgtgaatgacgtcagcccccgccgggtcgcgtgaccgacacccagccttcctactacctccccctgaccgccagagtgggaaatatcgcgagaattcgccttactatcagaacttactgaggttgcaggggagttactcagaagggaagggaaggtgtggttgtgcggcggagtttttgctttcattcttttaacgttcacagccaaagcaaaggcctttggggattgccagagtctcagccaccatcctggaaaacagcgggggaggtgggcctggaggtggcaagtgtaatgtggctcaggggccgtcattgccccttgcagaaggggctgcgggggagggagaaaacctgcgcccggttctggggagctggcgacgcagtgaaccctgctgaggctgggttttgccccgacagtcgctggtggctgtgggaagggttgggacccttctctgagagcagtgaacagcccacatccggcccctgctgtgtcaactctgagcggcgtggagatgaagtggttgctctcccttgctcggcccaccgggtgtcgtggcccgggaaccggcctggagaagtccctgctgcccggcgcccaaaacaggggcgtgggcttccgcgacccagggcggctgccccgggccatcctcgagttgccctgcatcttcccgctcagtcagccccagattgaggcagccttctctgtgcgggtttaaatgggtaactgtgacttctcgcctcattcacccaaacctccagtcttctcccccgcacatcctcctccacccacctggtttctccctagactggtgtgctcgtgtgtgcaaccaaaggagggagtgcgagagatccacgaagggacaggcttggagtcgctagagggaggtgtgggaccagcgaggagggggcttcgccagggagggggtgctggcaggcggagggagcggcgggaggaggcgccggaggaggagacggaggcctggggacggcagaagaggcttcgcctgagccgagcgctctttctctcgccgcgccgtcttgaagccgcgcgggctcgtgagcagcgcgaggccgccaaggtgcctcgcttcgccggagccgctgccgcccgccggagggaagccggcctcgggcgcgcacgctcgtcggagccccggcgcgccccgcgcctgagcctgctgacagcggccgctgggctcaggctgtccgctctgggctccgcggcctcggccccgctgcactccacctccgccccctcggactccctcccctctgcttctactcctcctgctccagtgcggatcgtttcgcaactgcttgccactcgtcccgtgcctggctgtttttccatttcccggccccctcttcttgagtactttaccccctgcatttggggacagggactggaaaaggggcgggtggagcgtccagtggagaagaaggaagcgaggcccgcaggaggaggaggatcggcggactgtggggaggagaccccacgccaccctttctggtcatctcccctcccgccccgcccctgcgcacactccctcgcgggcgagctactttcggaccaggaaagtaagagcggccctgggtgacagcgccgcggggccagtcccggggttagccgcgcgtctgctcgcttctggtccgtcgcgctcccagccagggcacagcccggaccgaggatggcttcgaccacaacctgcaccaggttcacggacgagtatcagcttttcgaggagcttggaaagtaagcacctttgcccggcatccgcatatcccctttccagctgagggcgggtcgcgttgcccccgacccaccggcctccgtcttggggcgagggagtttgggagaggaatgggaggagggcccctggtttgtcagctctggggaaggtgctgtcttaataaagggagggagcacagaaggggtaggacccttactccaactgtggctcattttgatggtccctagcccaccttctcccggtcccccaccctcctgcactgagagacttagtgaatttacgatctctgcagttgtagctatcatcctgagaagtgtgcgcgcgcgcctgtgtgtaatgtgtgtttggagaggaaattagaacccatgtaaaatgcaacatagatcatgttttctgtaaatagagatgcctcctggttagccggcgtgtcggc

SEQ ID NO: 73 - DNA, 6000 bp, Homo sapiens
tcttggggtacacaaactaactctcagctccaggggcttagtgggcttcattttatgaagagggtaagcatgtttacaattggattccaagacctctggtaaagcctccatacctgtcatttttctctttaactgcaacttaatttctatggcagtggttctcaaactttttggaatcagaattcctttatactcttacaagtttttgaggagcccaaggacctttgtttatattggttatgtctattgattgttactcattaaaactgtagaattttttaaaatttttattaatttatacataatcagaaacaatgcaagttaatacattttcataaaaagtaactatttttttcaaaacaaaacatttcataaggagatgggcatggttttacgtttctgaaaatctttgtaatatctggcttaataggacacagctgggttctcatatctgcttctgcattcaatcaattgtgatatgttgctttggttaaagatgtacatgaaagaaatccagtttgataaagatacgtagctggaagagggtgaagtacattaataccctttttaggtaattgtggatattcttctttgatactacaccagaacttgatgagtggtagtttcttaaagattacttacagtatagaatctgaaaccatatcaatgaatttttcatattttttcacattaaaacccactgatctatcttgtgctttgaatggatcttgtattacagcatgatttggtaacagcaagcattggtcatttggaaaatattggttcactgagctttgcggctcttccaaaatcttgagacaatatcaaaaagttacatttattaatatcaccacccatttcatcaaaaaggcctataagtatcaggaagctgttacattaatggtgacggatacaagttatctaagattctaatttgtacttgtaaatgcaaatattgtcactgccaaaaaatagtatgcattgttttctttgaaatttcaggctaacctcatttttttttttgagaaatacccctctcagtttgtcagtcagtcatcctttcaagtaaaaatagcattccattaaaaagtggctatttcaaacaatctcacaagtgattttccttcagacaacctatgtatttcagtatgcagcagaagtgctttatatgtatctacctttttgtcaacaaagaatatttaaaagtcttgtacttaaggattgagatgtaatacaattaataatttttactgctctatcaaggacattcttagatgaacctccctttttccttcctctaagtgcatgatggtgaagaataggatcactattatactttttggtgctctgccctgattagtgctaagatgtggcatttttacccaccattgcttttgcatcatcagtgcaaatgtcaacacagataaaaagacaaataacatcttactgttagtatgcaagtagttctgacctcatggactctggatagtatgaaagtagtttcggacctgcagaccacacactattctagggtaagtgctccctttgtctactcatcgttagcaatatttgagcttgaatagatttcacttctgtgagagtgtttatgaaacttcttcttagagtgcacagttttgagaaaatctattttaatttcacatttgagaggtaatggagatgggggtggagagagtactataattattaagataaaatatgctttttaaagcttagtccatgggtggggtgaatcaaatagaatattccaatctgatgagtatggccaacaataatcaaagctcatggttcatgggtatatatatcccaaaagcatacatttccaaaattatttatgcatttgattttgaaatccattatcgtaacccccaagtatttattttcctaatgtttttgttagtctgacattaaaattagtttgtgttccctgagcatacagcgattgagggtgagatgcaaatgaccttgaagagtgttttatagcataaaggtaccaacctgagattgaaacggaaattgttctgtccttatttccattttctattgttgtgtactatttcaaataatttttggaaagaggtggaggtatgaataaattcaatttaaaaatgcttttggctgttgatagaacacctatataattaaaagttgacagcattttcctgcatgcctttaaaaggtcgcaggaaatgtactctgctttgaggaaaggcctaaagtgtgttttcaattatagcaaactaaacattaggaagagtcctagcaattcagaaaaggtagtggtgtgtctatgcagagtcataatcctgaacaccctagccaaaggttctgagagagcagtggtgaagtgtggtgaccattttgttcagctgtaaagattctacacactcagagcattggtctacttggaaaggatgggctctaatttatcattaatatattaatttcaagtccaatgtcaccgacaatagtcaaaattatggcaaattgaatttgacctgagtggaaagatagttatatttcaaattataatgcagggcaacctaactaccagttttttaaaaccaacatttgaggaagaactggtttaaggatgatgctccttttttttttttttttttttttttgagatggagtctcgctctgtcgccaggctggagtgcagtggcccgatctcggctcactgcaacctccgcctcccaggttcaagcgattctcctgcctcagtctcccaagtagctgggactacaggagtgtgccactacatccagctaatttttgtatttttagtagagacgggatttcaccatgttggccaggatggtctcgatctcttgacctcgtgatctgcccacttccgcctcccaaagtgctgggattacagggtgctccattttaaacttgactgctctctgttttggttttagattgaattcatgcaggtgtttcaaacctcgctttcaatagcattacttgttactgggaagctagatcttttggggggagttggcagggaggggttgaacgtgagatttctctatcagtgaaagacatcttttgggagatacagcactctttaagcttcacttataaaagtgtgcaatataaagccttattattatttttaataaggcaagtcagaatttaacccccatggctctctttaacaccactgaagttgtaagaattaactcaacctcaaagaggcatgagttatccatgtaggcttatagagtgtcattttaatgttctatgtctttactgtgcctccactttctttgatgaaaaggtctatttaaaaattggtaggaaaatatttaacataataagatgatgagtcagagttttaaaaaagctaaaaagggaagatgtagttaaataatgcacctttttattttctagctacatgactcatgacatataatgtattctgctaagttcaaagtttcctcttacaaagagagttttatgaaacaactcttcttcagaccatttttatttcaattatagtagcaggttttggagtttaaatcattaacaacctctgagtgaacttttatccaaatgactgcaagtcacaaagagaacagtcctctttcaccaagtaccttttgtgctctagtgagacccgtccttttctatttttctcctttatgtctctctttgaagaaagatgtgtgatttgtaaggtaatgaaagtatgtatcagttaatgaaaactgctatattgggctcataatgcacactggaattgcttcagggtaaacttcatatacctgcagtatatagcaggggaaaaagtgaatttccgaagtaaagattgctgtgtgcactctaggagtatcacgtagcagttaaagcaaccatcaggggtgacctaatcttattttcctctctttgtcaagtagctgtaatgttcatttaggagcatttttcagttttaactccagtggacactccaaaactgggcacttattctgtcaactgtcaaccaagttattgatttcaccatatgttgtcttcattttttttaaattagtttttttggaatgtttttgaagagtgtgtgggagacgataacctccagatttaaggtgatggggtagggacaaaagcctgcagaatttcatacagaacaaaatgtagcttaataaacaaaagaaagtgaagagagaaatttatttcctttttaaaagtcagtaaaataatgaactaatcgttgtttaaagagtgagaaaaactttttccccctagatttggtgactagcgggataaatttgaagaactccatcccacccccgcacgcgcgccccccattctttccagacagagcggttgtaaatccgaggctgagtccgccctgggagccttggggcactttcctctttgctctgtgtgtgtgtgtgcgtgcgtgtgtgtgtgtgtagctctcgctctttccctcagtctgtgcctcttgtgtgtgtgtgtgtgtgacagagagagagcgagagagagagcgcgagaggagagagagcgagaaagagagagagagagagcaagagagcgagctgtgagctgtgctgccgccgccgctgccctttgatcccgacattagtgttaggggctcggagacacagagcgcggccatagacaccgccgcaccggcactcatttatttatacctcccatcacacacgcgagcataggacacacacacactcacacctattagatccgtttccattgaagaatattacgctcggggacaagccaggtgcacgaccaaaaatttaaaaaaaaaaaaaaaaggaaaaaagaaaggaaagaaaagaagaaaacccctcttctggctccaggaaacaagcttcaacccattgcacacaccggagaaggggtttccccctgcccgcccgcccgccccccaactacctccccgctcctgccagtgtctgcctctctgcccccacgggggtttatttgatctcacattaaccaaggaggagaatgtgagaaaagggggaaaatgcccaggaggaagcaggagcagcccaagcgccttccctcacgtaagtcatcccttctccacctcctctcgtgccattttctcgccctccctctcctctttcccctccgcagcctcctccgttgttttctgcattagtttagggttacagaggtgaaactgacaaagacacagcccgggttactcctcgtttaggtctatgctgaggcagccatgttggtgatgatcagccccgtgccctttctattctctctctctttttctttctttctctcaccccccccctttttttccttgagatcgggcttttttttccctttccctccccttccccctcctcactctgggttgctggggggagggggcaagagaagggaggaggggagtagtgtggatgccgggggttttatcgggggtttggtggggggaggtgggagaggttggaatcttaaaaaaaaaaaaattccttgtggattccggcgcctgagggtgcgggggtcggggcgcgcggagggctgggggccgtgacatggcgtttgggggtgtcggggagagggcgcgcagcagccgccgggtacaggatccagggagaggtccgtccctggctaaaggttgcgccggggttggtcggcccccgagccgccggcggcagcggcggcggcggctggagcaggaggaggcggaggtggaggaggcggcggcggaggaggggagtcgggggcgggcgaggcgggagcggctggggagggtgtaggggcaccgcacacaaacacacgggtacacacgcgccgccgggcggctgctcccgcggcgccgaggcgagggggcgcgccggggcgcggggcggccgggcggggggcgaggccgggcagcggcgggcggatgtggggtgcgggagctgcgccgaggcgaaggcaggaggcagggcggctcgcggcgcgcgaggtccctgcagagcggaggagagggaggagcag

SEQ ID NO: 74 - DNA, 6000 bp, Homo sapiens
aaaccagaattatctttcctttgtattactctggttttcttttgggccccacttcacaggaaaatatgagccttgattatccattcttaccaaaatatcatttactaaggcaggaatattaactcaggtaagcaaaatgattgtttctttcatctcagcaattccacacttactcccctaccaattgactttttatagaatattagtttgcattaaaaaatccatttaattgcattggaaaaacacttcactgccatgctccaggccgataccatgttgcagctgctcctatttaagggataattgtagcctcactcttctacaaggaactaattctgattttgaaaggatttgtcctcatagtttatcctgatgagagaggactggattattgccgtgtaaaatagctgaatagtcctattatagctattatgtcacaaatgttgtgtattgttgaagatcaaagtactgtaccacactcaatggtgagatgtacaagcatggcacacttcccaaattatgtaaaaaatactgcattttatgagtcatttagtaccatgtgagctatctgtggacctgtttcatttccctcaaactttcctcatcattctgaaatcctttattttctggtagaaagacttacaatctagtcatttctcactagtctccccaggaaataaacttcagtactctgcattcttccattgaaagatattacttattgcatatcattccattttacatttaaattactttagaaaaatgttaaataaccctggacaacagtaaatgctaactggtaaattgagaacatgtaaacatttcccatgaaaaccattaatgatgtccttttgaatttaaaatgtatagcactcaggattggctagattctaaggaaacaaatagctacttcaccatgtaacctcattgggtatacacatgtccaatgagggcttaaaatcctaggtgggccatatgaggtataaaatgaatggtattttaaaagaatgaggctttcttttccctagaaatattgcgacatcagctgtcactggaaaactagcccataaatcagaaaggccagtgaagggctaaatattaatttagttatacaatacggcaggctttgattttagttttaatatctggcatttcaaaatcaacccctctatatgacatttcattctcatgtgcatctatagagggcttcaacccttgaagaaaaactaactccaaaatctagcaaagaatgcctgccaggaagtaccatggtttgttgaataatttttataagactcttgtaaatcacagataggattaactgtctaaaagctattttccccaaagtaacacattctgtatgtgatttggagacattactacaagatttaggacttaacctacataatacaaagaatcagtagacataaaatgtggtcactgaaaacaagtataaatttgaaaacgtaacaatttgtgaaactataattaaagtgaagatgggcaatgttgagggaacaaaatcaaatgctccgtgtggtttgtaattactgatgaggctttccaaagtaatctggaaaattaaataagactgcgaaattcaatgtaaagaaattaggaccaggtccacgatatagtaggcatttcacaagtaggtactgatagcattacatcagcactggtaaagacacgttttgtttacaggcactcattttctggtaactagagtacataaagttcctaggtcaggtgaataaactgtaacctggacctttacaagtcatgcaagtttactgacagtaaatgggcaaattgccaactccatctctaaaaggcagcgtaggtgatgaggttttgggagtggtgatcctcaatgtcctcttatggggatcaacacaaaatgacaatccagcctatctactaaaatttcatacttttaacatttcctttgttaaggactctttccttctagactaccttatctttccttttaggccagtggttctcaatcttttctgaaaattaaagccactggagagcttttaaaaattcctgtgctcaggccctacctgaaaagaactgaatcagaatctgtgcgtgtggggctctggcatgagtatttttctaaactgctaagatgacttcactgaccagactagtttggaaaatactactctgaaagactacatctagagcaggaaccattttaagtaatttgttttgtattttaaacctataaataatacaaagcattagtgtttttcaccactctctctgttgattaatgtacaaatgaatgagtgaatggacaaataactattttatttatccatgatgtggagttgaatgtccaggaaactgaaaagtattacaatgatgctctattttattttctaaattaagaaagatttgctcagaggtttagatattcaactttccccaacttttagtacaaatacatccatttagtttttgatgggccttggatacagcattataaagtgagcattttttcagattacactgagatggcctctctttgtataagtggctagaagtaagaactttttcccccagtagctcatattcccacctatcacaccatgccatgtacagtataccactttaactccatacactccgatggaagaaaccagactcttgattatgtagaagaatgcacaggtctcatgcatttggattttcccttaaagcagagaaaactggtaggtctgtagaggaaagcaggagatatcattatctcccaggagtcaagatgcagataatggtattgttccagtcttgaaccatttcatttcatcttcctgatgttcacgaggccatcaaacagacatcaatgatgaattccaagaaagttttatttttaaaaatcaagttttgatataataaatgttggattgaggatagaaatttaagctgagaaatgtttaatttggacctaaaaaagtttattattactattattattgtggaaggaaatacatacaggcacattttagtatctacaacagtatttgggaagctgttatgaaacacaaaacttcatttaaattttattataaagacctttattaggagaaaggacatattttctatttcttacttttattttgtgccttgaaggacttgtgaatgtatagaataattattttttcttactgcttcctctttgcaacccaacctccaccaagtcaatcgtgaaggtaggaagaaagctgtatttctgttacttttaaaaatgataacgagaagaaattaaaacaatggcttaagagaaagaggatgtaaggagtacaaagcaaaacttaacaaagagttagtaaaggaacttgcattgacaattcactcagccatgttaattttatcattaatactgtcttcatcatttttttttccaggtctctctgctcgtatttgcttggtgctccgaaatgcacgggaacagacagctatgggaaagctgcacagagcagttggcaatcaacatgtcctagaagggtgtgtggagtagcaaaacaagtggaacggatgaagaacttccaagctccttcgcagagttttgggccctagtgtgcagggctgctccctcatgagatggaggacaatgtcgcccacacctacttggacctctcaccaaggacactgccctcagagataaatctgttggacggcagccaagagaccccaaattgtctcaacctccaggacacggcaagttgcaagtttccgagttggggaggcaaagcgggaaaacatgtttggcgatttcctcctgccactcaccgaccggagaaatggggaggcggactccaggtctttcgtggactgccaagagccctatagggcgtccagctataaaaagagaagaatcccatgaaggacaacaagcaaactcatatgttatccctttagccggattgtgtgctgatgattgtttccctatttacacttcgaatcacccctgtggtcttttgtgagtccccaaggcagcctcagccttcgcaaaccgtccagtggggcacgaatctcggaggggtgcgggctgcaggcggcagagggaagccaaagaggggcggcttttccaggccgtccacccccaggcgagctggtcctcacccttcgatcggctcgagtccctcggacagttgcccactcacagcgtgcaaaggggtcgcactccctgtgggttctccgccctcagaagcggcgctgcgcaggaaagtcacctccactacgggccgggagtagggaggggagcacagtgacagggttggggaacagccgaggaggagtgggggtcgcggagataggggtggggacggccgcggagagggcggtgggagtggggtggggccggggagggccgggggcggggctgcggggcggggtgcgccacagcgccccctagctgcgcgctccccacggtgccctgaggccgctggtggctctggctcggcagcccctttgtgtgcgacgcgctggtcccgaggagcgcggcacgggcacagcggaggcctcccagggtcccaccgcttctgtcccagccaggccgtgctctcctccttctccttctccgctcctcctttctccggtccccggcctctggttccgaacagcagccattgggccttgacgagcccgcgtccggccgcgctccctaccccgcccggcccgggacgctcgcccccctcccgccctgtcccttctggatccccgccccacccccccaccccccacatcccgggcctccaaggtggagaaaataaactacaagcagaacaactcagaatctccaataaaacgcccagtacctagagcccgagcgcgtgtgccgggctgcgaggggcgcgggaggcggggatgggggggcgggcgggggggacaatgagcgcatgaagttacctgcccggcggcggcggcagcggcggcggcgggaccaagaggcggcggtggagcaggctgcgcgctcggcgccgacgggtgcgcgccgcggcttgggggagagttgagcgcttttcccccctcttttttttttttttcctcttcttcttaaacaaaccacaaacggatgtgagggaaggaaggtgtttcttttactcctgagcccagacacctcactctgttccgtctaagcttgttttgctgaacacttttttttaaaaaaggaaaaagaaaaggagttgcttgatgtgagagtgaaatggacgtaagattttatccacctccagcccagcccgccgctgcgcccgacgctccctgtctgggaccttctccctgcctggacccctactattgcaacaaggtgaacgctctgcttttgtttccaccgtgttcttgctgcttgatcctgggaggggagcggcggtggccgggccgcggcggggccggcttggcggaggccggtcccgggcgcgctcggctcgcagcccgctgcagcctgcgtgcgcttgggtagtaaatattgtggagtagctccgggggcttgccaaacaccgcgattgtgcggaaagtgacacgatttgctcggattctttccttcctgctgttcgcggctaaggatccctgcctaggtttgccggggggcgtttaaaaaaataataagagaaaaccgtggaatactttgggggtgtgtctggggtccaggaacggaggcagagtaagagaattcagtttatttcccagttcccccttctctctccctccctccccgggcagtgggggctcgtggcaccacttcccttctccggattagttgccaggggagcagccgggagtcggggtgcagggacctgggaggcgcccctgccccccacagggaaaactgccccacaactcttttgttttctcaaaccggttccggcagccgagcccgggttcggacacaggtccgcgggccagagcacagcggggtagctgggtcaaggtttggggaacagttcctgtttaaggggtgcgcgcggaaattgcaagtttgttggg

SEQ ID NO: 75 - DNA, 6000 bp, Homo sapiens
atgttaaaaacaaaaattttgtaacttttggaaggctgaataggactatttttatgacatttcctatacaaaaaccagaaaaagcaaatcattatgaaagattggtaaaattacgtttttaaaaattcaagatttcataaccaaaatatgaagacaaaccagactaaaaaagataattggaacatacataacagatcattagtattcaaaatatgtaatatctaaaaactgacaagtaaaaaaaacaacatagaaaaatgagcaaaaatgcctgtaatcccagtgctttataggaggaggcgagatgggaggattgtttgagtccaagtttaaggttacagtgagctatgatcctgccaccacactccagcctgagcaatagagtgagatcttgtctcttaaaaaaaaaaaaaagagtaaaagatatggcctcagaaatcacacactgcatttgctcaatatcctggtagttacaaaagtcagcactgtaaaatgcaggagaaggctatactggggcatgaacaccaggaggccagggatcactggggccatctggaagctggctaccacatatataaaacaatattttgtagcgcttttaaaaaatatatttgtattaaaaatataaaaacacatgctatattatgccccctctagtggttacctctggggactctggggagggaggaacgggacaggatcaaacaggtaacaaagcaaacttcaaatgtatctaacatttgcaattacatgcatatgtgtgtctgaagaaaatatagccaaatgctaacatttattacatctgcatggtagaaatacacggattttcttgaaatcatttacctttcctatatctttgaaatatgtcaataaagttttaaggtaatgaatccaaacaaatggaaataaaatgtgcttttaataataatttatttttacacattttaaaaattgcaattttcaggagatgtaagaagaatatttttctaatactgaaataagcatatctttggtatagaaatcacaccctatgtgtttatctttaactaaaaaaactaatcaagaactatgacctaatatgttaaacaaaactattctttgcccatccatctgtcccctctcatagccccattgtggggcattagaatatagttctgtacctatctccatatctacaaagaattaagatgttgtatcaaaaatgtccagaagttatatatggtagagaattagttggcttaatcgttgacacacaacacaaaacaccaaaagcaacataagatacaggatgcaaaatagaacactgtcactaagatcaaataatacaaaaaaaatcacatcatttaaatttgatgcattgcaaacaaagtaacttctttagaattattatgtacacaacttgcaaagctcaaaaagtaatagcacagagccataaatctgataaggcactttaaagatagcaatcaaacatatacaaatatcaaatacaaacactgttaaactgcaaaagcagtaaccacagaaataaatagggaaaaaatatgcattctttctaaacagtctttccctttctgaagtaaagtctttaaaaaaaaaatcaaacaagtacaaaaaatatttatcatatatttttaaaacctatcatcaaagtccaaatctctgtaaaaaaagaatgtttttcttcaagtcaaaaaagttcagattcatacatttcctagagaaacaatgacagtcttcatgctaaatataggaagaaaaaaagctttcaattatgtttgttaactcttttattcaacaaacatttagtgaatgttgtgtgaccctgttttaggtgctggggatatagaataaagacacaatcattagctgtagacaacttagcctaacggagctggatccaccactggcaaccttaaagttacctcccttggtccttaagatgaaacgcaacttcaaagtctgccatgcttagcatcttgttgcaaaacaaataatggtctacctagtttgctactggtagcactgtggctctattaatattaaccgtctattgatgaagttaactttcataaaggattctatgaaagttcagaggcataaagtatttaaggacaaacaagtactggtccgcaacaaaaatagcatcggtattctgctttcacaaaaaccaagaaaaccaagaaaaatttcattctgagtatatacagaactgctggacagaggtcatcctatatgtgtggtacatgtacaaaatatgacataagaagtatgaattattgcagtcattattaaacaacgaagtatgccaaatcagtcatcaggtttcaaagaatcatagccttctttcaagaggtcccgccacgttttaaggaaacgtgcattttctgtacatttgaaggcaagttcttccacttgagctgatactgcagatgtggcttcaagaagtttggttaatgaaaaggctgcctaaaaaaaaaaagtcaaacataattttatttttaaaattctcatctcattttataagcaggctgaaaatagcttaaggctttgaatccaatgcccatgttattttctttcaaagtaatcagttttcaaactacagcactggctctttcacggaacctaagaaattctttaatattgagtagactttgaagaaacaggtctgctagaaaaatatccattatgtctgagatatgacaaatcagtatagttgttttctttttttttttttttttttgagacggagtttcgctcgtttcccaggctggagtgcaatggcgcgatcttggttcactgcaacctccgcctcccgggttcaagtgattctcctgcctcagcctccttagtagctgggattacagtcatgcgccaccacgcacagctaattttgtatttttagtagaaacagggtttctccatgttggtcacgctggtctcgaactcctgacctcaggtgatccgcctgcctcagcctcccaaagtgctgggattacaggcgtgagccaccgtgcttggcccaggattgctgttttctatgaaaatacactagagtctcagctcaacaagatgacttggaccccttgacactaagcgccagatatatctgagagatttcatcataaataattcttactgctatttgggtaacatgggcattgacctgtgaacactttaaacaatgaaaatgtatagatcaaagaacagaaactctgagctctgacaaataacattaaaaaatcacacacaaatgcagaaaacactcagctcctggtggaaaattcacttttcagccaaacgttttcttcaccaatgatataaaataaaacagtgttcctcaataacacattagcacttcattctacatatttacttgcaatcagtttgttctgcaaaaataaaagctggttaagcactctagtcatccttaaaaaaaaatacttgcggagcaatgagataatctagttcatcccctagtttccaatctgcaggaaaggtcaggccacagaactctcccaggttacactctacatacctcattccacttgacccactcaagagaacataaaactccccttccctgtcttctcccctccagtggtgtgtgagttacggttgggaggtggggtgctagtttctggggattcgagatttaacagaaactatcctaagtatgcattctagcaatcatacaaagggaggagtcctgaactaaaccgtcaaagaagccaatccacgtgacctaaacccttcaagctgggtccagcgctaagcaggcctggggcagacaatggcattatcagctgtccctgggcaggtggccaactagaacagcaggctctaagtcccatggaaagaaatcacagcctgatctcaagtacccacagaaagccagcaaactcatgcagtgaaaactattctccgaaacccatgcaatgaaaactattctccgatgggaaaggaggaggcagagagccagcaacaggcagcgcagagctgcgtggcttcgggttactgcggatgattgaaaccagaaggcgagacaaaaagaaaccagtgaggggtggggcgggtggaaggaaaaccccttaagactcctcaccactaaatctaaagggggaaccctcagagaggggtggcactttagctgctggcatcccccccgcttcccgcccgcacgctctggggcgcagaagggccggtcgtcccgggtcatgggggttgggggaccgattccctagcctcgcgagccccgccgccgccggtcttcccagaggcgccgaggggggacgcggtcccgacaccacactcacgtctccgatctgcagctccacttcctccagctggtccaccgttgggccgctgctcctgctcggaactggccagcccaaactcactgggccgcccggggaagatgctgcagaggcgtctgaagaggagggagaagagggaggcggcgggggcggcgaagaaacctgcaactcctcagggtcggccatggggaagggttgggaccgcggaatccgacccgagaagccgaaccgacaccaactgtcttttaaccactcgcgcccaaagccgaaaggccccgcctcctaacgccagaaatcccgcccagtctcctcgtgggtctcagccccggaccacaaagacgtttcatttttcgggacagccaatcatatgagtcaattcaccttaggcaactcacggctcctgcgcgagcctccaatcgatctcgaagggcactcgtagagaaaactacacctcccaggaagccgtgtgcgtcgccccgccttctactgcctttcactgcgcgtgcgtcgtgctgtgggattcgcggacccctctggccgcgctgtggctgtttcaccgctccccggctgggacttggagtcccttatctttccctggtttggtacatgacccggaagcctcggctggccgttgcgtcatccatggcgccggcgcagagcgagaaggaggtgggaacgccgtgaagcaagagcggtcggcagagcggggaggcgaactgcagcagagttcttgctttccggcaggtgatggcgccccccgcggcctagaggtccagcgcccgccgcgagcagcggacagtcctcctgttgtgtccgaccgagagtcctggtgactttgaacatgctggtgccgctagccaagctgtcctgcctgggtgagaggaaacgggcggtggggataagtggaggagttagggcaaaagggacaaggccggtcctgggggctgtaggcacctctcgccccttctctcatcagctttctcaggctatctagggcaaaggtcacgcgctgtcagcctgttgggggaccctggcttcctccctctggggttgccccagttggtagaattaatatctaggctaaaggtcaagggcggggaaaacttgtcaacacgccctcggcatcaccaccacctgtcaacacacacacacctcggtggactcctgaactgaggcttcccaaatcctggttctaatcttcaaacctctgttggaaatggaaaaaaaaaaatcgtatttgcccagtttttctccctggtcctgacctgactttcgtcttcggagccattctagttcagtctaaagaaattgaagtctgatctgtcacatcatggttaacattcatatgttgaccaagtcacccaagtgtatctggagccagtttttctgcgttgtctaaaattaagggctgggcgtggtggctcaagcctgtaatcccagcactctgggaggctgaggcggatggatcacctgaggtcaggagttcaagaccagcctggccaacattgtgaaaccccatctctactaaaaatacaaaaattagctgggcgttgtggcccactcctgtaatcccagctactcaggaggcttaggtaggagaatcacttgaacccggaggtggaggttgcagtgagctgagatcgcaccactgcactccagcctaggtgaaagagccagactccgtctc

SEQ ID NO: 76 - DNA, 6000 bp, Homo sapiens
gggctcagcctttgcatgttcaggggtgcctcaagctcagtttgtttgaacagacctctgctccgtccctcatctggatgcaggaacaagactcccagcctcaagaatcacttgaagccagcagttcaagaccagcctgggcaacatagtgagacccctgtctctacaaaaaatttaaaaaacaatagccaggtgtggtggtgagtgcctgtagtcccagctactacggaggcctgagatggcaggatcgcctgagcccaggagttcaaggctgcagtgagccgtgattgtgccactgtactccagcctgggtgacagagcaagactccatctctaactaaaagtaataataataataataaagtaataatcataataaaatttaagagtgataataataatttagtcagcctccactcttccccagatccatttcctgtccacctgggatgggggtctcatttgctcaaaaccattccaagctctcctttgccctcaggatgaagtctaagatgccacaggtgaccaacacagccccgtattaacacagttctcaagagcccagactttgggttcaggtacacctgagtttgaatcttggggctggtccaagactccaacgcaagtggaacttgagagcttgagcaattcccttcacctctggaagcctcagttcccttgaatgtaaaatggtgataatgacaactactacaaaggctatgatgaggtatctgcacccaacccagggcttgggacacagcaagagatttggaggccagtgcatggcatgaagattgaggatgtggtggggcacgatggctgccaggaccagctttagacatgctgaggctgaggggcctatgtgtgtccaagggaagtgtccaggggcagctggacatgtgggcctgtggtcaaaagggagagcttggccagaaagcaagcagggaggtcgccagcatgtgagtagaaagatgagctcatggtgtggggagggccgagggtgaggcctctacagccagagcttcacccacaaggaagagaagctggagaaggaggctgagaaggagaggcagtgaggtcggaggaaacccggcagccgtggcttcgcaggcacccaagggagacagggcttggggcaggaaagagaggtcagcagggccgaggctttgaagaggccaaattagctgaagccagagatgagtctatgggatttggggactagggggttacgattgggagctggtcccaggcaaaggctgggaggggagagtggtgatggtgattatggacaactttagagaaatgcagctgaaaacagtaggagaaaacacaagagagatgctttttttttttttttttttttttttttgaaacagagtcttgctctgtcacgcaggctggggtgcggtgagtagtacaatctcggctcactgcaatctccgcctcccacattcaagagattctcctgcctcagtctcatgagtagctgggactacaggcatgcatcaccatacctggctaatttttggatttttagtagaggcagggtttcgccatgttggccaggctggtctcgaactcctgaccttaggtgatccgcctgccttggccttccaaagtgctgggattacaggcgtgagccaccacgcccagccacaagagagatgcttgtggaaagggatacgggcttgaggttcccaatgggtgaggctagcgccagtacacttgctgctggggccagtagtcagttgctatatctgtggtgcccagcacagggcctggcatgcagtaggaactcaatacaagtttgttgtctttgaggacagggagcaatggggtctaggaccctggccactggcaggaagagggaccctctgccattctgccaagaggaggcatggtgggggtgaaggcgtgaagcagagtgcagggcaggggctccttgggaatctgcagcctcttagctgcagagggaagaggaggtgacaagtcagtgctgagtgctctgctccaggaacccaagtacagtcagaggacagagcgagagggctcctggagtctgccacttggtaccccctactgtagacatctgttcccctctcctcaacccagcagccggtgggttacctggtctttagctccttcagagccgtgctctccctacacggccagcagagggtaccagtgagctgctggactccgctggaggagaccagagcccgcctgcccacccctttgtcctccagagcctggggcgtgctaagggtttggttaaccaggtttctgaccaaggcgggttggaggctgggacaaaggactaagggaggctgtgggctgagggcttaggggccgagtggctcaggtgctctgctcctggtcacccttcattcctctgccctgccaggccctgctttatctgttgaggctcctgcccactgcccctctccgcttctcttccctggaggcccctgacagcctagactcctgcttctagcagaggctggttttctgcccctaggcaggcacgacttggcaacaggcctcagacagggctgggccagcttctgccagcaatgactgccctaaccaccttgtacttctagaacgtctccacctaataagggataaggggtcagtggttgaggaggccacaggagctggagcataggtcctgggaaggaggaggcttggactaggaagtgggatgaatgggcagggggagtttatataaaaatgtggcagatggtccagtcccaccaagacccaaatcccataagactaatggctctgcctgaggtggcacgaggttccagaagctgagctggaaacacccccttcctcatcctaaccatgttatactcttcagccaaacgcaaatcccaacatcgcctcctggcaagtctgtccccatggtggccttcacggttccttcccaggacagtgtaggaccctgcttctgcctctttccttatcttgccttcctgccccatccccctactcttcaactcctgctttagcaagtgctggttctatctgtgttgccttgaccttgaaggctccccaggaccctcatctcagcttctactcccttcctcactccaaggggaagactccaatggactgaggctggagaaaccacagccagactcttggtgtggtggctaaagctggggggtctggccaatccaatctctacagctcaaatcaggaagtcaggccaggggtgctgtgtctgcctccaagcctgggccatacattcaccgcaacaggaatcagtgactttggaaaaggaatgtttccctgagtttctagaggcaggatgacccagaccgaaggacagagagttaccagaaacacacacaatgcacacaaatgtactcacttgcacacacagggtcatggcatagggagtgacacaaccaaatggcctggacaagccacagagtcccatggacacaagtgcttacaaacacaggcacacaaggtcatgtacccaaggtcaggcacacacaccctcctcattcaagtcctgcctcccaggtctggggcttgcctgtcatctgtccttaggaggagggataggtggaggcacaggagtggctcagggcaaattggtcctccacccagagactctccctttaggtgggtctggctcccagcctcccctgagatttccctggctcaccagggggctgtgtctggtggcagagagggctttggaggaggcattgccctgaaaccctggcagagcctgggcacctaagagagaatgagcaacagggctaggaagtgtgacagggagtccacaacctcccaggatcttgggagggcagggatgaggcactgagcacggcctggaagcccacgggaagcagggacccctctgtcgagggctacacctactgctctcagcatcaagcctgcagccaggtactggcaccaactcccagtgcctggcagagccctggcatggatgctaggcacagggtgccagacacgggggtgggcagggtggggggccactgggccacacacaagcatggagaccttcacacacgcaggcagaaaaatccacccacactcataccacttattttaccccctgggggttcaggggagcaaggcagggaccaccctgtcctagaggctgccttcaccgacgtccctctggcctggctcttggggttggcgggggtgggccataagtaatgggagacctaggtgcttcctctgacaccccaccctccactgacccccacacacatacatttgtgaggcaggaagtggggttgtgcgtccccaggtttaagccctggaaggaaagggaaagacggggcagagactccaagaaccgggagcggtcgtcctgttcccccgccagcccctgtcccaggcaggttttgtggccgcgagctgctcaggggtgagcgcgccttagggtgtgtgcgccagggacctggcgcagccgaccacgtgggagtgcggcgcgtgtacgggcgcgggcggcagcggcagcggcagcggagaccgggtgagcaccggctggttcctcgcggtgttcctgcaggcttggcggccgcggtggtgcgatcagcaaagggcaccgggatgccggttgtgcgtgtcctcaggtgtcccgaacaagcgtgagtggcatgtgctcacctgagcgcggcggcttggcggccccgggcgtgtgggtgggggcgcggcggagagctgaggccgggcacccgggctggaccgacgggccctctcccaagcaccgcccgcagccaggcggctcctcgagcgcagcaactttgggactttgttccggctttttccaaatcgaatctggtcgagggggcggggcggggggggagcacctgccctgcggggggtgccgggagagaagtgaaggaaagccccgcccccgcccctcccgctccccgccctctcccccgcccccggggctcttcataagctcggcccgagggcgagcagagaaagcgagtgtccctctcgcgccccaggccggtgtacccccgcactccgcgccccggcctagaagctctctctccccgctccccggcccggcccccgccccgccccgccccagcccgctgggccgccatggagcgctggccttggccgtcgggcggcgcctggctgctcgtggctgcccgcgcgctgctgcagctgctgcgctcagacctgcgtctgggccgcccgctgctggcggcgctggcgctgctggccgcgctcgactggctgtgccagcgcctgctgcccccgccggccgcactcgccgtgctggccgccgccggctggatcgcgttgtcccgcctggcgcgcccgcagcgcctgccggtggccactcgcgcggtgctcatcaccggtgagtgcgcgggtcgcggagcgcggggactccaggctcgagggcgggactggacactcaacaggactgactccccatgggcacagccaaggcgggctcctcagcgcaagagtgggagagttctccacccctgggtgcagggagcgagccaaatagggagcgccgggcacctccccaagcccgggttcactacctgccgctgcggggagtgttggagggaaagtgagacagggagtgggccggttcgagaaggaaactgactggtggctgagaagagggaacctcctggagtttgagagtttatgccattcccttccccaagagagcagtctcaggggacttcggaggccttgagaagggaggatcgttaccccttgaactctgcctgacatccccacctaagatacccatctcccattcctcgggccagagggaagagcttagatggggaacttccccaccccacccatcccccactggctgggatccttggagttcagaaaagctagaggtcaccgtgaggggcagctggacattcagctgtctttctgtctagccacccactgccaaactgctgaggcagtagtttggagcctacacccagcaccccacccccaagc

SEQ ID NO: 77 - DNA, 6000 bp, Homo sapiens
agaggctgcagtgaactgtgatcatgccactgcactctagcctgggtgacagagcaagaccctgtcacaaaaataaaaaataaaaaggaagaggccgagtgcagtggctcacacctgtaattccagcactttgaggggccgaggcgggcggatcgcctgaggtcaggagttcgagaccagcctgagcaatatggagaaaccccgtctctactaaaaaatacaaaattagctgggcgaagttgcacatgcctgtaatcctagctactcaggaggctgaggcaggagaaccacttgaacccgaaaggcggaggttgcagtaagccgagattgtgccattgcactccagcctgggctacaagagcgagactctatctcaaaaaaaaaaaaaaaaaaggagagtggtcacagagagtttctgggagaggccttggaggctggaagtgaatccaagtctgtgatcccaaagcccctatgtcagggcggggcacggtggctcacgcctgtaatcccagcactttgggaagtggaggcaagcggatcacctaaggtcaggagttctagaccagcctgaccaacatggtgaaatcctgtctttactaaaaatacaaaaaattagctgtgtctggtggcacgcacctgtaatcccagctactcggggagctgagacaggagaatagcttgaaccttggaggtggaggtttcagtgagccgagattgtgccactgctctccagcctgggtgatagagtgagactctgtctcaaaaataaaataaaattaaaaaaaaaaaaaaaaaaagctgggcgcggtggctcacacctgtaatcccagcactttgggaggccgaggcgggcggatcacgaggtcaggagatcgagaccatcctggataacgcggtgaaaccccatctctactaaaaatacaaaaaaatagccgggcgtggtggcaggcgcctgtagtctcagctactccggaggctgaggcaaaagaatggtgtgaacctgggaggcggagtttgcagtgagccgagattgcgccactgcactccagcctggaggacagagagagactccgtctcaaaaaaaaaaaaaaaaaaaaaggttcaggcccggcatggtggctcatgcttgtaatctcagcactttggaaggttgaggtaggaggatcacttgaggccacgagtttgagaccagcccaggtcccatagtgagacccccatctctataaaaaaatataaaaattaggcagatgcggtggtgcacacctgtagccacacctacttggaggctgaggtgggagaatcacttgagcccaggagttccaggctgcagggagctgtgattgcactactgcattccaacctgggaaacagagcaagaccctgtctcaaaaagaaaaaaaaataagataaaataaaataaattaaaaaaataaaaaagttttagtagtgatgcatttatttaaacgttcactaggaaaacgctggttttccaagtggagtcgtgatttaaagttttctttttaaaaatatgtgcactaaaaaacgttaaggctgaattggctggaagaaaaaagtaaataatcctacaggtggtaggtatgaggatcttgctaaatccggaaggtgataaggagtgaagtttggaaattttacatgctgcccctggggcaaaccagtggattcagtaaatatttgtgggttcagctcctttgcgcagcttaactctttcttccccctttcctccggtcacttccctcttctcatgccattgtcactcgctgaagtctcaggccactcaccagaagcccaccgcgttcttccaatgcgcgccctgatggtccaacagagggagccggggctccgggacggtctcctcccctgggagagcgagaagagggcatgacccccacctactctcaggtgcacgaccgctccttgcgtgtcctcccggggccgagtcagctctcattcccctcaggtgggctgcgagccagaggtggtcgttccatgagggtgggcgggaatactcaccctcggaatccgaaaagcgccgccgcgagcctgcacagcctcccatcgcatcaagttcaggtcccccgagggtccagggtcatagagtgtccaaagggggctcccacgggagggatgagggtctgcgacaggtgacaaggatcaacgcccgattgccggtcccagctccggcttgtctagggcactcgcgccccgcgatccatcaaggaagctgggggctccatctcgagcgccctacgacccaccacgccccacccatcgtactctcccccgccccgtctacagcagggaccctgaggcctgtacctttaagagcagcagaatgttctgcactatgcagaggccgtttgtcggatcacgtgacagcacccgcgtgttcccccatcacgtgctcagaggttttccctacttccgggtcctctctgtcttcgctttgggccttctcggcttcggagcgtgaaaaagggaggggctggagaaccctggaaccgcaggttttaaactggagcgggtgggagcagcaagcagagccgtgaccttagatcagtggcgcccaagaccgagacagtagcctgccagcaccagttatgactgtgggaggcttcagctcctttccttcagcactcacttgccagaaacaaatatggccacctgcctactcccttttttttttttttttttttgaggcaggactgtttctggttgcgaacaaagacgaccagcttcaggtcattcttatccccatctgttgaccttacaaattgttttagagacctaagtaaacataacactcatctaaagggatttcgtgaatgatctattggcagtatccaagatgttaagagatccctatttccaaattatcctagaaccaaaaaatatcacagcacttcaacccctggtgttacagatgagaaaaccaaggtacaaatatatatatatatatatataacaaaattagccgggcatggtggcgcattcctgtagtcacaggtaccttggaagctgaggtgggaggatcacttgtgcccaggaggttgaagctacagtgagctatgatcacgccactgcactccagcctgggtgacagagtgagatcctgtctcaaaaaaagaaaaagtaaaaaataaaataaaaaaaatatatgtatatgaaaaaaattggaaagttgctgacaatcattcatacaatgttagacctaaaggtgaccttagagacctgtatggtgataagaaatagagcaccagaggcagggagccattgggttggctccaggctgctgcaggattcctgcctccatcaaaggtggtgcttagaccagattttttttttttttttgacagggttttgctctgttgcccaggctggagtgcagtggcaggatcttggtttgctgcaaccttgacctcccaggctcaggtgatcctcccacctcagcctcccgagtagctgggacagcaggtgcgcaccactgtgcccagctaatttttgtgttttttgtagagactggattttgccacgttgcccagggtggcctcaaactcctgagctcaagcaatccacctgccttggcttcccaaagtgctaggactacaggcgtgagccactgcacctggccagactaaatgattttaaggcctaagattctgatgctgtgatttcatagaattgccctaattggaataggaaagtggggctggggaggggagaaggagggtatggggaagagaagtagagcaaggtcactttatgtagttccaaataaggaatcatacccttaccttcttctaggtggaaagcggcatcctgcattctcttcttgtccttggcctcatctctgctatgggctgtgccacctctatatgctctttctcaccaccaggccttcagaatgcagttggaaatgtgccctctcgtctgggtgtggtggctcatgcctgtcatcccagcactttgggaggccaaggtgggcagatcacctgaggtcaggagttcgaaaccagcctggctaacatggtgaaaccctgtctctactaaagatacaaaaattaaccaggtgtggtggcacgcacctgtaatcccagctactcgggaggctgaggcaggagaatcacttgaacccaggaggcagaggttgcagtgagctgagactgcgccactacactccagcctgggtgacagagtgagactgtctcaaaaaaaaaaagaaaagaaaagaaaagaaatgtgccctctctagtgtgcctcccaggtcactcagctgatggaaaatggaatcctactaacgtgcagggctctagaaattcagcagcgtttcatacatggcatctgccatcaaggaagtcacaggaaggtgggaggcagacacagatatccacaatataaagtttagccaagttcttttttgcaagcctaatcataggtgaggggatgcaccccagagccaccaatccggccccttccgcccctgggggaagcattaatgacgccgaaatgtgtcagagctcccaccagccccctcttcactgctactctttcttcccaggcaaaacaggaaccacaaaccccagcttcctcttgcagagtggctgtggcttgtaggggaggcagaaatggctgaggtgcggatacgagacctgagtcacttgagctgctgttgccacatgtcccctccctctccccctccccagttctaaggtctcctgctcccactttgtcctttctggcctcttgcttgtcctttatttccaaatgtgcacctgagtcccctgtgtgatgtacacccatttcccgggctgcagtgggggctactgtgggcatcaggggccgtgggcagggcctggggtggggacgcatcagggagacaggggaagaggaagtgcctttggtcctggggaaggttggcttgtcttggtgggtggggacggtcattatcagctttctggacacacagacagagacagacaggatggacttcctccggctatacctccctgggctgcaccaggccttgaggggggcactggtgagaagggcagacagctgccagatacttgcaccccattccctggggcctcacttccgggcacctcccctggggcctcacctttcccctcctccttctgatctcctcaaactggagattgctttctcaggttcaggcagactcctggcctaatattttctgaatttcagtccccacctccaaccatgcgtcctcgtacccctaatcgatgccccttctggctccttctgcaaatcctcttcttctcctttcagatcccagtaccctcttccttaacctgggctcctccagccagggcccccagggaaagggctgggactctcctcaatgactctcccctctctctctcttttttcctaggattccctcggcacctttgtctcctacctcctgggagatgcagtccccactgtagagcgggaggcgcaggcggctgaggaactgggggtggtggcggtgggaaagacagggaagattgtagaggaggaagcccaggaggacctggagggccttagaggcagccaaaacgagggggctggaaggctgagagggcctggagatgacagaagacatgaagtggggagctcagctgtagaacagacctggggctggggagatggcagctcccatgggtcccaagcagagaggcaggacagtggggctggggagacagccaaggctgccaggtgccaggagccaagcgcccacttggaggccagaaagaaatccaaggcagggtctggggcttgccaagacaggagcggccaagcccaggagaggcaggagtcccatgagcaggaagtgaacagagaagagaggctgagaagctgggaacaggaggaggaggaggaagaggtcagggcaagagagccagggatggccagaggggcggagtcagagtggacctggcatggggagacggaggggaaggctggtgctgttgg

SEQ ID NO: 78 - DNA, 6000 bp, Homo sapiens
tgcccacgcagacgctgctctaagcccctggcatatattaatttaattctcataacgatctttggggggtgggtacacactagtcttacagtctccattttccaaacaggaaaacaggcacagagagggcaagtgatttgcccaaggtcacatagctagtacatagcagaagggcttggaatcaggcagtctggctccagagtctgtgcacttaatcactaagcagtaccagagtgaaggagatgattcctgcctgggaggcaaggacatggagactaacatgtatggaatatttgttgtgtgcctgaccttgtgctgggcattttacagagatgatttccttgaatcctcccaacaagcctgtcaaatagggactatatccattttttaaaacaggttctcactgaatcacccatgctagaatacagtggaatgatcatagtacactgcagcctcgaactcccggacttaagggatcctcccacctcagcctcctgagtagcttggactgcgggcactctccatcacacctggctaattaccatatttttttggtaaagacggggtctcactatgttgcccaagctgttcttgaattctggggctcaagtgatccatctgccttgaactctgaaagtgctgggattacaggcatgagccactgcacccacagggctatacccattttacagatgaaaaaccgaggcttggagagccacaacaacttgtgtaccattgtgctgcttgtgagtcggggaccctgactcctgatgcacctctgcctgggagttgcgttgatagaggcgggctggcaggatccatgtacccaaaccaagagaacaaaaccagaggggcgccgggcacagtggctcacccttgtaatcccagcactttgggaggctgaggcggatggatcacctgaggtcaggagttcgagaccagctggccaacatggtgaaaacctgtctctactaaaaaaaacaaaaattagccgggcatggtggcgcgtgcctgtaatccaagctacttgggaggctgaggcacaagaatcgcttgagcccgggaggcagatgttgcagtgagccgagattgcaccactgcactctagcctgggtgacatagcaagactccatctccagaaaaaaaaaaaaaataacaaacccagaagggcatatgatgaatggcaaaacaaaacggagtaaaagaaaacaagagttggggagaggcctgaagtcgtggggtggtgagggagatttcactggggtgggggcttcacttgccctccctcctaggatgggtgcttggagggggccacacggccacccaggccccttggcagagcttgcgatgccttgtcctcaccatctcatcagactgtctcatggctccgtgtggccctatgcgtgctggcctctgacatgctcttcctccaccatccaactctgtcccatttctacttgccctttgaaccccactgagacatcacctccactggaagccctccgcaagcactccctcacctcggagtggtttgctgtctggaccacaccacctctgttcttgcacagacttctgttgttgccttgagcatgtgaccttttctcccccactgtgttgtgacttcataaaggacagacgtattttacacactgttgtagctcagcctggaacaaatggtctaaccgaagtgaaatacttttgtaacttcgcgactgggtggtgaagtcctgatctcattctctgatctcctccatgaagttcccctgacttccccagggtgggactagaagcatcttgtaatcattcatgaacaagcccaacacccccagcgcccagcacagggccaatacctaagaagcctggaggagttttgctggtgaaagaacaaatgcgtgaagtgaccatatgttctgggtgggggaggccgggcgggtgggatggcctcgtgatttctgcctttgtgccctgcatcgcctggggcccaccgccaagccttgaacatgccaaggcccctagaacacgggtttggtgaacggctgactgcagttgtatgaattccaacacatgctggggacagaggggaaggagccaggagaagtccaaattctggggcatttctgggtgagcacacatgggacccggaggctcagggcactggttgtcaactgggcttccctgagagccagccctgcctctctgagaacccctgagacctcacctttgcccagcagttgcacactttgcctccagttgcacactggagggggttactgtctcaccctccaccccctctggcctggcctctcttggaagaggaggctgcatgccagcctgcctaagcacccccaaccctcttctcgccaccagacagtgggccacgagcaggatcagggctggtggggacacaaagctgccacagccagtccccttagagctgcacacctctgctgggtcctggcccctgccccacttggtttgtgccctggtctcactcctcacctcccctgcagcttgtctgcttttgaggggttcctgcatatccaccctggtttctgggtgcggatcgccctctgttcttgcccctctcttctctctgctctccacccacagccatcccttggcccttccaggtggctcctctccctccctgactcttcagcccccatcactgtccctctaggcctggggccctccgtgtcctggtccccttccccgtctccagcctccatgtgcgccgcacgcactggctgtatttttagctgtcactgattagcctctagttctgacacagccctggcccaggctgggttggggcatcctggttggcactgccctccaccttgagggggttaaggaggtggcactcagcctctggctccatcctctacccagcatcagggaccagaggtctcaagagctgggtagggggcagacgcctgggcaggaggaggattctctgctgctggagaagtcctgggggccacagttggtgtttccgggtaggcacaaaggtctcaagcccagggcagagtggagctggcttcctctccccggtgggtagcttgtgggggtaacctggaggggaggggaggtggggggaggaggaagcgcactgggaggtgcagactgagaagaggaattaggttagggatgtaggtgggtgggcgggaggggatggcggcatctgctttggagcttcctccgggttccaaacgcatccccacacttcccttcccctcctccccacaccctgcccccacccccgcgggtcccgggagaattcgcctggtattcccccttccccatcccccaccaggcgttgccacagggtggggggtggggtggggggaggccagcctcagctgtctgaaggatggaggggctggggaagcagggctaggtgcccagacggccgcgtgtgtgggaggggatgtcctcagatgccctccacccggcagtccccgctctgacgtgggtgccccccctctccccgcccggattagtggcagcttggcctgactctccggggctccttcccccgcccccgcctgctgccctcccctgggccgggggctgctccgcccggggggcactgtgcttgcccaggtaaggggctctggggatggcatgagggccgccggctcgtgagtgctgctgtgcccgtcagcacgagcgtgtgtcagcgagtgagtgtgtgtcagtgagccaggggtcggtgcggggctggggcttggcccctgaatggctgggggtgctggtcagcttgcctttgtccacaagtctggcattgtgtccacgcgccgtgtggcttttcttctgtgtttgtgtcttttgtgtgtctcctcagctctgctccgtcttcaggcacagaacagccggctacaaggactctgtgggcctgtggcatgggctccaaagcgggatggggagctgggcgagggtggggaaggggtccttcctcccatcccgcgagtccccacgagcccctgggcttttcaggagcctgtccccaagagccctgctactctagtccagggaccgtggcctgacaaagcagacatggcaactggggttgggggggatatctgccccactcccctgggatagtccccatcccctttggggatgtcagcgataggtcctcagggttctggacagcgcaggctcccatcttggcctctccgaggccccaagccgcaggaatctccccctggcactcccacaagcttcggctgctgaggagggagcacagagaacacagatgggggaccacagacacaccccagcccttaccttcacccctggagccagcctgggagtgggaggccgggcctcagggcctggggcctccagtccatgttagaccctctacaagcatctcccctggcacactcaggtcccagccaccctcaggggagctggggaggaagggagtgttactaactcagtcatgtaaacaacccctaccagcctgccttgccacagaactggcctctgggggcaggccaggggcagggtgaatggatgccaacatggcccaagtccggcccagtgcccgctcctttagacccccgctccccaggacccccactcttctcaaccggtagaaggctctaggccttgctcatcccttaggaggaaggctcctggctattcagggctcccctctgcagggatggtggtgtgacttgggaccaagctagaggcatccagaacccatcgcttgcaagggatgggaaagagggagtgcagcttctgtcccaggcaggccaaggttggcttccgcagggaggcaggggagccgagggtgggaggtgggtgcctgaggggaagggaagcgcccgttgggcgtgtgggtttctgtgtgagtctgaatctgtctgtgtgtgtttgaatctgtctgtttgtgtctgcactggaaccacccccgcagcggagccgggatgcttcctcgggtggagggtgccctgcttttccatttcctctcctcctctctgcactctcccgggagccactcccatgggcgcctctccagcccctggcctggaagcaccaggaaccctggggatggggcagaccctcacagcccggggtctggagccggtgtcggagctcatctgggcccatgacctctccagacatttggcaaaatcaaggcccttagaccagggacagacccaagcccaggccctcccagaggtcctaggacgcaaccctttgtgcccttgggctctggaagaggtttgggaagggtttggggtggaagatggcaaagagcagcttggccaggtgaggatgaggcagggcagacacaggccagtggggcgtgccatgtgccacagatggagaggaccaggagccagtggcccggcaggcacagcccggttggcgtgggccagagcgcccatcactgacccgtgagaactcgactgcccctgccagctctggcactgccccctcccagccgccccgccctagcaccctggggggcaccccgcccaaccgtggcctggtccggcccctcccgccctttgctccagttcccgggcttggcacctatagtgggggtgccgcccgcctgccaggctccggggccgggcccacgggagggtggggcggctgggaagctggcacgctgccccgggggagcctctctcggcaggcgcccgggtgccgcgggggggagggggaacaaagggctcattctccccgtgcgcagccggtggcatcgccggggcgttggcggaagcccccggggcccgggagggggcaggcccaggcgcggccgccgaatcacgggctcctgtttcccgcagggtgctggaggaggaaaccggcggagcagcttccccactctcagttgcgcttctggcgatggcgatcagaggtcctgctgcgctctccgccgcgctctacctccattagccgcgctgcgcggtgctgcgccctcgccggtgcctctctcctgggtcccaggatcggcccccaccatccaggcac

SEQ ID NO: 79 - DNA, 6000 bp, Homo sapiens
gaaaatctgggagctatgtatgtacagctgttggaggaggactgtaaaggggctggtatagacatctacagaaggttgatggttctgtgtctacttcctctgtgaatgtgcagacaagcatctcatagggagcctggggctgctattggtccatagagctagtagttgaggaggagacctgggcatggaatagggagagacagggcaaactggaaaccaccagcacctttgcatctgtctctgactgtctccaaccaacagtaaccttagaacaaaatgactactgctcactgccacctcccaaatattattcttttggccaagtgtagctgggatccattcagggaaggtgattctgcaaaacatagttcccagaataatcaaggtgaaaatagaataatcttgcacacaggtctttgataagactaggaatatataatacataacagctaggaaaaaatatataaattttccccaagtgcttataatgaacaaacatatttgggaaccatatccacctagcctagtcaactaaattaaaagctggagtcatcttagatgctttcctctcaattaccctcaacatctagttaccaagtttcatataattttacttcctaagtgtctcttgaatatggccccattttctccctttttctctcactctctctcctctcattttgacacaaggtcttactttgtcatctaggctggagtgcattggcgtgaacatggcttactgcagcctcaacctcccagactcaagtgatcctcctgcctcagccccccaagtagctggaactacaggtgcatgctaccatacccagctaattttttttttgtagagatagggtttcaccatgtcacccatactggtcttgaactcctagactcaagcgttccacttgtgttggcttcccaaagtgctgggattacaggtgtgagccaccgcgctcagccagccatatcttctctatccttgttacaaatgcttatggtgtcttacctggaactcctacctgtttcctaatcagtctttctgcatctaccacaaatctgtccatactaccactacagaagggggtcccaaccctcactgtgctttagaatcacctggagggcttaaaaaaatccattgcctgggccccactctagaccatatatcggaccctctcacagcaaccttctatggtaccaccattacctttgttttgcagatgagcagactgagacttagcagagggttaaataacttctcaaagtccacagctaagaagtagtggagcttggatatagtgccgttatctgagtgcagagcgtatcctcctaaccacatagtatgatgccttccagactatgccacagggctaatgagatggttggtaggaccagtagtggaggtatggaacacaattagaagtacagaattgaggggaaaagaatgggaatggttttcaatttggttggtttgaatggattcttagacaaccaagtggtgctgttgagggggcagttggaaatacaatgaagctcagtctaatttagggctagtgagggatggacaggaggaaatggatacaaaagacaattctgaggtggaaaggacaggatccaatggctgaatgaaagggcgaaggtgagcggggatgtaggattggctgggaggagaagaagagagtaaagctatcttgaagaaaatttaatacaggaagggcagcagttttgggaatgtgctagagaggactatgagaataattttggtgatattaactttgagaacccagcagaatctgtaagttggaaatatgaatctggagtttgggagagaggttgcagtcagggattctgattgaggttgcatcgggtggttgaaaccctggaagtggatgagagggatgagtaaggtcaagtatgagggatgctcaagaagagaagcaagccatggattaaattctggggagatccaagataaggggtggggagaaggggagaaactaatgaaggggacccaaagaaaggagtgagcaagtgggaggaggacaggaagacagatagatagatagacagatagatagagaagacagaagagaaagagagagagaggagaaagagagaaacggagagagataaagagaggagaaagagatagagagaagaaaaagatagagaaagaggcaaaagagagaaagaagagaaagatttattttaaggaattggctcacttgattttaaggtctagcaagtttgaaatttgaagggcaggctgctaggctaaaaattcaggcaggatttgaagcttctctctctctgtttctctctctctttaggcagggtctcactctattagcctggtctcactctattaggctggagggaagtggtgcaatcactgctcagtgcagcctcgacctcctgagctagagtgatcctcctgcttcagcctcccaagtagctgggactacaggtacaggccactgtgctggctaattaattttttttttctttatagaaagggttttgacaagcaatgggtaaagaatttcctaaatggtgatgggataactggctagtcatatgcagaagattgaaactggacctctaccttacagtttatacaaagttaactaaagatgtattaaagacttaattgtaaaacccaaaactataaaatccctgcaagacaacctaggcaataccattcaggacataggcatgggcaaagatttcacgacaaagatgccaaaagcaaaaattgacaactgggatctaattaaactaaagagcttctgaacagcaaaagaaactatcaacagagtaaacagacaacctacagaatgggaaaacaattttgcaaactgtgatctaacaaagatctaatatccagcatcttataaggaacttatatttacaagaaaaaaccaaacaaccccattaaaaagtgagcaagggacatgaacagacacttttcaaaagaagacatatatgtggacaacattcatataaaaaaagctcaacatcactgattatcagataaatgcaaatcaaaaccacaatgaaataccacctaacaccggtcagaatgggtattactaaaaagtcaaaaaataacagatgctggagaagttgtggagaaaaaggaacacttttacactgttggtgggagtgtaaattagttcagctattgtggaagacagtgtggtgattcctcaaagacccaaagacagaaatattgtttgacccaacaatcgtatgactgggtatacacccaaaggaatataaataattctattataaagacacatgcacacacatgttcactgcagcactattcacaacggcaaatatatggaatcaatctaaatgcccatcaatgataggctggataaaaaaatatggtacatatataccatagaatactatgcagccataaaaaagaatgagatcatgtcttttgcagggacatggatggagctggaggccattattcttagcaaactaacacaagaacagaaaaccaaacactgcatgttctcacttataagtgggagataaatgatgagaacacatggacgcatagaggggaacagcacacactggtgccttttggagggcggagggtaggagaagggcgaggatcaagaaaaacaactaatgagcactaggcttaatacctgggtgacaaaatactctgtacaacaaacacccatgacacaagtttacctatgtaacaaactgaacttaaaagttaaaaaaaaaaaagaggttcttattatgttgcccaggctgatctcaaacttctggactcaagtgaacttccaccttggcctcccaaagtgcctggccttagatattcatacatttatttatttttagagatgtggtgggggtgtggggggtctctctctgtcacctgggctggagtgcagtggccccatcatagctcactgaagccttgaactcctggactcaagcaatcctcccacctaagcctgccgagtagctgggactacaggagtgcactaccatgccgggcaaacacactgattttaagtacaactgtgtgctttcagtcttaagatcttcagcttttgaaggacctcagccttcctctagttctaactcctctcgttctaaggagatccttcccattcctgcagaacgtctccccaacccttcttcttcacagttctccctcctatccctgaaccattgcaagaggttttgtgccaagcctctggcacatggcacattctatctcatgttgtgatttcgttttctatgcacgtgctctccttctagcctggaggtgagctgcttaagggcaaagagctcatgtgtagcccttccttgtacccattgtcctatagcaggtgctacctagggggtgctccagtagcttccttgaatgaaccaaagagaaggggtgaaggggggagtcagttgcctaggagcttgcatggacttctgtgtcctggaaccagcccggagctgctggaagatgctagaagttggaatcctatctcatttctaaacatctgctcccactcatctctttccagggtcatcagttatccccactcctcccccccgcccccactttgtataaatgagcccctcacatccctccatcttctccatcactgtgtggtcacttcttaaatcatgcgtctggaaggcgccctcctgtaccccatcctggaggcttcctgcacttcccctcttgtttcttccagaaatgagtcagagtgaaagcaaactttctgaggtcctgagatcccggagacaggctgtgagggccgctggccccgcccgctccagcagcgtgtgtgtgtatgtctgtgtgtgtgtgtgtgcgcgcgcgcgcgcgcgtcaggggccaatgctggaaaggaaacagcggactcgctgaggagaagaaaggagccgcccccttcgtcgccagccccctccccacttcccgtccagcgcgctgctcccttccccccgcctctggcctcggggaaggagcaggaggcagcccaggcggagcgggaggagctggcagcggggcgcatgccaggcgggggtcctcagggcgccccagccgccgccggcggcggcggcgtgagccaccgcgcaggtaggggagctgccacagagtcctagcacgtcctgggggggtcctggcaaggagggcgcgctctggcccccaggaagtcgcgtaggtcagggcgtgcctctgttaacaacccctttcgaggtgagggaaactgaggcaggacgcgaggcgtgcgaggttgagagaagagcgagtcttgggctgccagcccggcaccagcgccgagccgggccaggtccctgacccaggactgtgcagcgatccccgggacccgcagtttgcgaaactgtaggagtctgacccgcgcccccgctgcgtgtccaggtgaccgggaaaggttgcagaggcgtgcttggggtttggatccgtccccgtcctgggacacctgcgccgcctgcactctcgttgcggtgcgccccagcctgcgccccctcgggacaggggacgtcccgcccgccttaaccccaagacccagctggatctcgggttccaccccttcggggacctggagggaggaggctgggagcgggaccaggaactggtgcctgtgccttccctaggggctgctctgaaatcagtgtcaccgcccacttcctacttggctacagtaacggggatggcccaagccggagactgctcggtttccaccgcctggagcgcgggtctcgctgtcaactcttagtgatgattgtggatggttgtttttcaacaatgacaggacttctaccttctcactcttaaaatgtgaggttttccaaagacagtgagatttggagttagggagtgctgccttgtgttcttgctgggtgaggacagggctgggtcagtcgcttaacctctcagagcctcagtctcctgaaatgtaaaggagaacactcatagcctggcctccatgtgtcgtt

SEQ ID NO: 80 - DNA, 6000 bp, Homo sapiens
cctaaccaggtttccccctttaatagatctctcaatagtttatttcacttttctcacagccattcattagctttgacttcttggtgcctttctcatatcacctccaggctcttatctccagcattcctctattatctgtactagatttcgaatctattttctttaaactatctttccctccctcctcttatttctgtttttttgaaatgtcaatgctagtgagggggagagatgcagaggatgaatgtttttgaaatacaaacgccaagcctccacaccacaggacaacctaaaaaccaatcacagcattttaagggacatcttaaagtttggtggcaaatgataaacccttatcattttgtgaacacagctgccaaactcgattgattaacaggcttttgtttattctgggctggcaaatacacacacgttttaccttaagaggtgcctctttagtttctaagggttttggagctgactcatcagtgtgaccttttgggacaaaagcctaatttaggatatagatctttccagaagcacaattccttatagaacataaagtcaggggagttctccgagacgactttaccagcagctcagaggagcactgagggcttgaaatgcctccatacaggagggtgtaaacaatagagaccaagggcccagtctgcctccttttgtcaccgttctctatctctggaaagatgctctgagataagaaggatgagaagagaacggaaggcctgaatcgcaagagctagggccaagtgccagaagttttcaccaggccaagtttttgcaaaataaaagtgctattgccttaaaaaagcaagtatctgaaataagttaggaataggggctgtcaaaaaatgggcataaatattgacagtagtttactaagatacctagacctgtcccttcatttgtttccttttaatagatgattaattgctgccctgctaaaggagttttttttttttttatggctactatattgcaactctagacatcctctgtgcaatttctctcagcaagccccaactgtaataactgtttgctaattgtaaaatccttatccagaatgaggtttgggcaaacaatttgtactactgtaattacattgtaaaagtgtttagtcccttgattgttcagaattaattgtataaaggcctagaagttatattaggttcacagtttaaaatggaaagactgtggggggggggaggggcacttttcaaaactactgagttgattttaagtccgcaaactcaaactatctcattctttaaggaaaatttgtgtgtaggtaatttaaagtacatttttaaggtaatctggcacatcatggttaaagcatgcagtcgtctagtcttcctcctgctttgaagattttggttatgtttgcaaagggtgacttacctgaaccttcttttctcatctgtgctagaaaacaaaagaaaaagattaccggaaagcaacaatacaaaataaatcctgttgtcaaatatatatatatatatatatactgaccttttccaaatttgaaaacgtggccgcagagttgtggtaaatccaagccccgttacctctttgccgaagaacccctgaggctgttaaagaccacagtcctctaagcgtatttcgcaataaatttctctcagttaaattatacttacacaatttccctcgcagttcatttaaggatcataaacgtaggtgtgccctgtcggtgtttggtttgacccccacctcccacccacgcatctccctcctacccccgagtcgcgcagatgcctggcgggcctgatgcggggacgatgatcacacccccgcgagcagccatcggaaggcgctcaggtataccccgaagtcggctggggttccgggaaggggtcgcagactgccggcccagcttagtcctttccctaatcggaaaaggagcgtgctgcctggcccagccagcgcagcctcccaaggattaaacagaaatcgccttcctgagacggggaggttccatcttggcctgaaattctgcttccaagttcatgttgtggggccggggagcgacggtgaggcgtggggtgggggggtggggggatggggggaggccgggaagtgtaggcagaggcataaaggcgctggtaatgcacctggctgcccacccactccgtccccagcttttactcgcgggcctgtcttaacctcccaagtgatgtttcagggcgtttgtaccagaaaacctacacatgtatgtgatggaaaaaaactaaaagatcctgaaacttaagcgtcagaaaaaagacagggagaaacagagagaaaaaggagagaggaagcaaatgataagggatcctggagatggtttaaacacacacacacacacacacacacacacacacacacacacacacacacacacacgagggagagctctttcaaggcaaagcgcttctgaaggttttgggagaacgtgtgtcagcccttcaggcacacagggtgccagtacggagttgggggcggggaagggtgcagtgcaggcggctgggaaggctcatctgctcggctttatggaaacgctccactgttgggggcaaccaaccccgcgttgactcctgcgaagtgctaaaggaagcgatagatgtcgcctaaggagactacggacgctcggtggaacctcattccagacctatgttctcatgctcgccctgtgtctcctgctcctcggaagcccactctatagaatcttcagtcctacctcgcagacggacgcaaattatcttttactttgcgcttaagagttggcttcaatacattttagagctcctaacctttcccaaacaatcttcggatgaagggatacccccaatcttgctcaaaactctttccctacctacacccccttgagggtgagggttcagtccgcagctggcgagtgggacgtgggtgggggcgatggaggcgcgggcgggctgcttggagggagtcagccttttggccaccttcagggcgggaatagggactggcagttcgcattccccgcagatcgaagctccctgctgatcgattatttgataattgattttccccgcagccaatgcgcggcggcctgggcgggggcgcctcctgattggccgagcactcctccacggctgcctaccgagatttgggtgagctcattttccagtcgaccgcagggggagttttctgcgaggtttcagctggagggagggggaaaaatcctctcggagccgagcgagctgcgagccctgcttgtggatgtgaggtttccagccactggtagagctgctgcggctgagccatctcggcagatcagagcccagcggacagaaatataaatacgaaaataacgccactaaatataatcacaagggagaagcttagagcgggagaataaagagaaggggtgagggggaattaaagcccaggcaataggtgttaaagttaaaaacaaaacaaaacaaaaaacagtggttggttggagcctccgagttgtaggtacaggcagcttttgtctgaaatctcagcttccgaagcggatttctttttctctggcactgggaggtttcgccgagccgggttggggacgggaaagaggagcgcggggaaggatgtctggggtggtgagggcagggcttcgctggagaaagagctagtggggcgcgaggttcttacaggcccgggagaggtcgaggctggagcccctcggcgcctctaagacaaaggcagcggtggctgcagccggagcctagcactccggcagcgtcgcgccgcgccgcgccgcgccctgggcgcacggccgcctcaccccgagcgggtcggagaaagagcctccctcccagcggctccccggccccggctccgcccgcgaggtctgggctgctgcgagcccgcgccgggtttcgctttccgacgatcataaatagcttggtgtttgtaaacaggcgctgggggcacattccccgcgctcagctcattgttccctcccttcctctctacttcgcgcaggacgcctgggctggggctgggagccgccggggctaggaggtgggggagtccagacccgaagtgacaaaatgctagcattttctttcccccggccgggcgtccacctctaacagcaaagaaacctctaagctgggtctgcagaaagcccgagccacctcaaccccatgttctcaggactccttagcagaggctttcccaacctggcttctccctccttttcctccacgatcccgctttgacttttctccttgcagtgtttagttctgagaattcagtactttgcgcatcaccccctgccccgaaaaacactggcagaccccaataatttcgaggaaagtcatgaagtctatgcgcggagccctgtgcaaaataactcccgctgctgcctgcccggcgttgattcccaatttatttcaagagagtcggctttggggagagagtctgcagggggagggagagaaaagaatactgaaaataaagctggcggccgcgggctactgcctgcgtttgtgtgcgtgtgccctgggtgtgtggtgtttgtgcctgggcgtgcgatttaatggagcgcctctctgcctctccagtgcggccagagctcgcttcgcgcacccacccctgccgaggagcctacttgctgcagcccaatgcattgtgtaagacgcgacctgttatggccaccactacttccgggttctagcattctggtcggaatccacctctccgcctgtgcaacacacactttacacacgcacggggactgcaagcgggcagcatcgatcgtggctcctttaagacaaactcagacagacattttttttaaccctccttctctaatctccttccagtgcagcacttgcaaagagggagagagagggagagaaagaaagagagagagagaagagagaaactgattaggaattaggactgattcaagggaagcgagcgctagggctttgtgcatttgaatattaacatttgaggtgttctgaccagaagaagacagagcggatgatcattcattcaccacgttgacaacctcgcctgtgattgacagctggagtggcagaaagccatgagatttggtagttgggtctgaggggcgctcttttttttccttttctttctttctttctttttttttttttaaactgatttttgggggagagaagatctgcttttttttgcccccgctgctgtcttggaaacggagcgcttttatgctcagtgactcgggcgctttgcttcaggtcccgtagaccgaagatctgggaccagtagctcacgttgctggagacgttaagggatttttcgtcgtgcttttttttttttttttttttttttccgggggagtttgaatatttgtttcttttcacactggccttaaagaggatatattagaagttgaagtaggaagggagccagagaggccgatggcgcaaagggtacgtattaaaaaacaattgtggaactcaaatgtgagattaaattgaaacgtggccgaaagacactgctaaaaagtttcctttttttctctctctcttttaaaaaatgaggctcctaaagccgtggcctaagcgagaggatttattcaatgcatttgtagacttatgtatgttacttggagttgttaattaaaggaatctatttatctatagattcctaaccagcagctatataaataaaaatgcaagctcaaacaatcatctgggtttttttttaaaaaagctagatacctaaagctgtaatttgaacattcagagatcagaagtttaaagttatgtttaaactaaaatatgcagctggaaacttctgatatgttattgattatgctcatctttaatatcactagaagtattcagctttttaaaggaaataactttgtcatagtatagccaattttttggtcagaaaacattcatctttttatagtaatttcaatttgtatagacttgtatacaaggcaatattttgcaa

SEQ ID NO: 81 - DNA, 6000 bp, Homo sapiens
tgatagtactaagaggtgtggcctctggaaggtgattagttcatgaagactttgcctcatgaatagggtggagctctcataagacaggttgaagggcccatctcttcctcttccatcatgtgaggacacagaggcgccatctatgaggaacaggccctcacctgacaccagagatgctggagtttgaccttggacttcccagcttccagtgctatgaacaatacctttctgtagtttacagatttcccagtctacgatatttgttacagcagccagaatagactaagacacacgtacactccctcccttggtcagagaagccaacagggccggggccaggctgaccagaagggagatctccaggcccagcccaaggcaagctcgccacagggatgcgtctcgagcatgagcacctgctgtgttgtcccggcctgggatgacgagggcacggtgttcatccctgtctctccctccctcacatcactcaccactgtcagacaggagagccacaagccctctttcctacttacacttggggcagcatcttctgttcttaactggctgggaacttttatcttcagagtcagagatctgggttgtgaaaagcaggcaagcagacaaacatctctctgcagccttctccccattctcctacccagtttccagaatttgggggaaaaaaatcccataagctgtcatacttcatattgccatcaggcagcagtgggaatggtgcagagaggagctgggcaaaggggcagagggacagctttctttgtttttttgttttcctccatgaaatggggaggtgtcaagtgagcgagatgtccccggccacacagtgaagcacaaggcagccgaagacacagcaggcaggtcaggtctgtgtgcacattggcaggctgcatgcagaccagcctcggcccaggtggagaagcagagggatctgcaggggaaccagggattcagagacctgttgttggggtcctgcagaagatggggcaattcaagtcaccaagccagtctcaccccaatggcctggctggttgcagaaactcaccagggacaaggggtcaccccaccacaggcccacctggacatgtgactcccctgcacccaccctcacaagcaccaagggcaggatcctcacgccagaggccaagtcctcagtgtgcccctttctccccttcatgttcagcctcagcagctggaagtccacagaaataaatcagacacttctaaaatgggacaccatagggaaggccagatggaataagagttctcttcccacagacctagacttccattgactccactcgaagtcaactgggtgatgctgttggctgcaagtcaaggccaacatgggctgtgctaatagatgcagaccctctagagggaaggagcacatcaccctggcctgttctgtcctgatcacactgaataggtgttctttggtggccctgaatttcatgagggacacgaggaactggcacccatcccgagaaggggaaagtgggacaaaagggcgtcttctaggaagccacactggagagactgggggcatctggtccagagaacaagggtctggaaagaatgttgttgccatcattggctggccagggcctactctggggagtgactccatgttgctatggtgtgcagagcagtcagggtgatagggagtccaattggacacaggttcagtttgctaatggtgacaacacttaataatggagtgggttgccagttgaggtagtgatatagtttggctgtgtccccacccaaatctcatcttgaattgtagctcccataattcccacatgttgtaggaaggacctggtcagagatcactgaatcataggggcaggtctttcccatgctattctcatgatagtgaataagtctcatgagatctgatggctttataaaggggagtttccctgcacaagctctctctcttgtctgccgccatgtgagacatgcctttcaccttccgccatgatcatgaggcttccccagccacatggaactgtgagtccgttaaatctctttcctttgtaaattgcccagtctcaggtatgtctttatcggcagcgtgaaaatggactaatacagacaggaagtggctccccactggaaattaccagctgtcagcaatgccttagcagaaatttctgttggggttgggactaagctggtcctgtcgagagctccccttgcctggttgatcctcagggttctacttagaatgcctcgaaaagtcttggctggacacccatgcccagtctttctgcagggtcccattggggttaaccttctcatttcatcccatgtgaaccaggccaggcccatcagggtttggcaaccccctgatgcagtggttgctgccaggtgacaggagcaagcctgcagctgctggggggccatgcagagacagcctgccagaggggagaccacctggggaggccagagccgtggagacagcaagagaccaggggctgaggacagagtagtacaggtctttggtcccagtagtcctgaaaccactgcactccgaacctttctgtacttagcttaagccagttggagtttctgtcctttacaaccaagagccttgataggaatggggtcctgtgctacgctactgttggcttctttcccgatcgggcgctggaggggaacacagcagtgactacagtgggatgcttactcggtgctgggcatgctagaaagtgcttgccatgccttatttcccacgtggtggggattttgaccccactgtacagacagataagtgaggaccctttcacttatcctgcaacagaaaatccagcagccaaagccaacaagggcccagcatagcatcttccctctctgacttcatcctcacgctccacacaccatccccctggccattcccagcagcccagtaagcactgcctcacacttccagttccggaccagccaggatggccaggctggatgggggccatccaccggctgaagccaattgcctattctcgagctgaaggtgaatcaatcccgcataaatcttcgggcagagaactgggtgggggtagaagagggggaatgtctagaaggaaattctgggcacattcctggaagtgaggaggatggatattggacagaaattatgtcattgcaggcaccctcacttgccctggccacatggacagttcctccccggctgtgttccgtgcctcctctcgtgctccagggcctgtctgttcctggagcgagatgggtcccagggctgggcaccagtccccatctccagccatcaggcactttcctctctgtgttttggcgtaaacactccctaggtttgtggatctgaatcctcttcccaacacactcaagctttgctggcctccctgcagtgtatgtttaaggcaccacacagcctccaaggcctggcacccgggcagtggcacctggtaaacacagcagtcagatttcctcatttcagccaagtgtaaaatcaaggtaatggatctactcttttttttttttttttttttttttttttttgagacggagtctcactctgtcaccccggctggagtgcagtggctcaatctcggctcactgcaagctccgcctcccaggttcatgccattctcctgcctcagcctacatagtagctgggactacaggtgcccgccaccacacctagctaattttttgtatttttagtagagacggggtttcatcatgttagccaggatggtctcgatctcctgacctcccaaagtggtgggattacaggtgtgagccactgcgcccggctggatgactcttgagacaacaccattcagacaaaggcaaggcctcccacttaaactcataaccgtgtctcctttctctccttcgatttgagcggctgaatttggttacagtcatctgacctgtgggtgtgaagtccacctgcctggcataaaaagctgtgcctcctttctaggtgaggagaaagagagagacctggctcatctgaggtgtggttgggaggggggacccaggtgtgctggaaatgaaaagaaatgcattcctgtttttcgtcccaacatgcaaacaactgaacaaaagcattagggcctgagactgggagtaaagaattccttgtcaccatggataccaggaaatggccccacttatatataataagggctttagagatgctggaccatctgatattccagcctggggccacatgggagtgtgccctggtgttattccttatacagttccatgaacatggctctggaaacacctctgtctgcagaaaatgaggcttttctttttttgttcgggggtgaacagagggcagaggcctgggcatcttcactcagcacccctttgtaacccagcacttagcaccatggctggcgcacagcaatgtcacatgtgtgagtgcacacgatgcctcactgccaggggtcaccccacaccggtgctgttgggggcgttggagtggttatctcttctttagtcctcaagctcctacctggcagagagctgcccaacaccgtcggggtggggtgggcgggaagggaagaagcagcagcaagaaagaagccccctggccctcactctccctccctggacgccccctcttcgaccccatcacacagccgcttgaggcttggaggcagtggatttccgagcctgggaaccccggcgtctgtccggtgtccccgcagcctcacccgtgctggcccagcccccgcgagttcgggacccggggtttccggggtggcagggggttcccatgccgcctgcgaggcctcggctcgggccgctcccggaacctgcacttcaggggtcctggtccgccgcccccagcaggagcaaaacaagagcacgcgcacctgccggcccgcccgcccccttggtgccggccaatcgcgcgctcggggcggggtcgggcgcgctggaaccagagccggagccggatcccagccggagcccaagcgcagcccgcaccccgcgcagcggctgagccgggagccagcgcagcctcggccccgcagctcaagcctcgtccccgccgccgccgccgccgccgccgccgccgcccccggggcatggcctgtctgatggccgctttctcggtcggcaccgccatggtgagtgagcgcatccttcgtccgccgggaacggttttattttcaaggagagcaggaaacacacaaagactcgcaagctcgacctgacacccctcccaggagcgcgtcctctgggcgctgacccagggcaccctagagtggcgcccggctccgatcgctgcccctgcccctccgccagggccacctggagcctcgggatgccccttgcaccggcagagagcacggactaggtggaggggccgggagtggggcgggggcagcgagttgccctacaagttggaccgatggccttgacctgatggcttctgggcggggggcgtggggagctggggacccggagcgcactggggactggggaggggccgcagcttgggccggagggaagaggggacttgaagaaggggagccccgcgcgcgcggctgtgggcttggggaccggggacttctcgcgccatccccaggaacgccaggcaaggtctgggggaacaaaagaggaagctgcccccagagagccggagcctgcgactgcactcccggggacaccctctcccggacccactcggggaggcggcggcgaaggcccggggagacccgcgaggggcaagcccggattcctgccggccgcctttctgcgcgcgccggagagagagacgcggtggggacagggatgcgcatttcacttccccgagctccggagagggatggcggggtgtcggcgagttcactgctggacacagttactgtaagtgctgtttccaggggtggtcaggaatctccctttctggttttctggcattaggaacaaacaacaaaccaatcatcaggcccccagccacccacctcaccttatcct

SEQ ID NO: 82 - DNA, 6000 bp, Homo sapiens; identical to SEQ ID NO: 12

SEQ ID NO: 83 - DNA, 6000 bp, Homo sapiens
tgccaggctttatatcctccatggtctggagatacctttctaaaacacaggctagcccctctgtgtcctgctgcaagcccacccatggctccctgttgctctcaggacaaagcagaagcttctagcatcatacaggaggagccccactgtgagtagcctcctgctcctcccaccccatcctccagcttagatctcctccaggtttccaaccagggccaggctggctcctctcctgcttccagactgtgcacaccatgcttccccattccctttgcccagcgccttcttcagggtctttatccattgtctatactctaagcaccatgagagaaataagcagtcctgttcatcttaccagaagcccacagtcagtctttcaggaatggctgatgactagtgaatgaagcaatgaaataatgagtgaatgatacgcaagtacaatgatgcagaaccaggaccatcaaagggggtggggggaagaggttgcagcaaggacccgacagtgctttgtctgctggttcagattcctgttgggaaggggttggaagttaatgtcctgcagtcacccctgtggatcataggtgtgcgtgtgtttgtgtgtgtacctggggatagacaggtaggcttccttgggggatatactcatgttgtcatgtgacctccgttcttttcagttaaccattttgaagccttaaaaaaaaaacttcttttaggtattagggagcaataccccaactgatatctgggtggccaacatcttggccaccatctttctggtaagcacatcccttatggaatgcttgtcaaacacagactatgctagtttgaatatttccgtctgtatatgcacaacagacattcaacataagtagaaatagtgaattccttctgtgagccaggcactgggctgggccttggaagccaggttagagacccgggagatgatcttccttcctttccaattgctctgtgcctgctgatgctgtatgatactcttatttatctgtgcttagagtgaactatccaggttttcttagtgagaagaaaattatggaaacttaggaataaggagcagaggatatagcaaggggaggagggtagaattagtttaataaaagtaccaacacaaaaaaaattctatctgcaggctaataaacgatacaacatatacacaagtgtattagttcattctcatgctgctatgaggaaacacttgagagtgggtaatttataaagaaaagaggtttaattgactcacagttccgcatggctgggaaggtctcaggaaacttacaatcacggcggaaggcatctcttcacagggtggcaggagagagaatgagtgctgagtgaagggagaagcccccttataaagccatcagatcttgcaagcactcaatatcacgagaacagcatgggggaaaccgcacccatgattcaattacctacacctggtcccacccttgacacgtggggattattacaattcaaggtgagatgtgggtggggacacagagccaaaccatatcaacgagcctccttttgtttaaggaatcatggagctactgtaagattctaatatataatattgtagagaaaagaaatttccccaaaatattatgactagggggcttttccccatcattctaagtcttagcttgattttgccctaggagacttcctatagtgggaattaattattcataatttttcctctcctattacaagctttccacatactcttagatgagaaaagtgagtggcctctgttagagagttcttatgtgcatttggactttctttactggagctgtctcattttctaaactctcattcagtagctagaacttttttttttctcagacacgtttccagtttccttttctcagatatatattgtcaaatcatctagctcactagtgttaatcactctgttcctaatatatagcaataaaatttcagaagagaatcttagtaagattacttgcaggagttcaagaatgtggcgtgttcttaaaactaggggacaaggttgatttcaaccattgttagcattatgtttctgtaatcttagccctgaataaattactcaagcatcacaaagatcattagacaaacaacaaaacaacaacaaaatcccacccagcagcaccatttgtatgtctatgccagtgtctacttctgtcatacagtttgtaagtattagaggtcggaggtgaaaaggaaaggttaattagcccagccttttatgcaaaacaggttgcatagcattttctccatagtaattttgagagagagagaaaggatagactttacaacacatagctgtggggaaggaggtttattattaaacagagataataaataagtgttggaaaccacacacagcaactggagcttagcttttatgtgtcttggttgccagcagcttttactacttcaacagatcctgacaacaataattagaattcaagggaagcaggaggaaggtgattaatcttgcaaacccatttctggtagcacatcagcactggtctggggaacggggacacctggttcttcctctctcctgccccatgttctccacactggctgcagcacacatctgtctagtgacagattttagaatagcaaaccctgggctgtatcaagcgccaaacaaaggccaaatgacacaataaaagcatcatttatctttcaaaaacttctccgctactgccaagagggaggacccacacctgggaaaagattgtctctcttatatggaagaaacctgaattgtttccacgttgctttttccttgacacccaggccactttccatcgggttgtcaggatactcctaagaaggggagtcggaaatgccagatgttctgtatcacctttagttaaaaaccaagcctcctgttactagagaccattcaatgtccactattccctttggtgagttacttaaggaactgtgcgtctccacctgcaaccccatgcctcctctcctgttgaattcccaacagcagttattgcccctgtccccaatccccacactaatgggggccctacaatttagggcagaggccatttattacaaaacgctcttgaaacctgatccctccactcctcccctaattttggatgcacagtttaagtaaggaatctcttagcacttagcgaaggcttcttcgctgtggcagatatcacaattgtaactgggccctcatcagactgggagcttcctgtgggtggaagctgcatccacagagcttagcaatgctttgtgtactcggtaggtgctcagtaagcctttgcctgggctctgggaatataactcctttgaagtacaacatacaagcagtaaagtgcagacacctgcagtgaatgtacagatcaatggattccacgtgtgtatacacagaggtttacaatggccacccagaggagcgttacagaacattcccctagagactcccttgacgcagggaatttaattgccctcccttccatcctgtgcaggcaggctggttgccagtaaagggatatgagatgccctgatgcatccgcagacagaacccttagtatgggggggaaggacctgtcattctagagtaaaagtaagaccaggaagattaaagaagacaaaaatttaaaaatgcaaatggtgaaaagcataaacaactattttcctctctccccacactcacccagaagcaccggggccaaagagagggcatgggaggtctcaggatcccctgccgccccaccactgccctgatgcccgcttgtgacgcagagaccggagtggctctgaaattactgtcttcaaagcaggccaaaccttgcttgacacgtgcaaagttccaatctcttgcttctcagctccccgcacgcgcgggccaacgtgcacttctgagccagatcacctagccacaaggagggggagagagggggagataggaggagagaggggaagatagggggagagacgggggagagagagggagaggcagagagagagagagagacagagaagagaaaggaagcacctgagacagagagaaagaagagagagaaaggaagcagcttcccccaacgctgcggccttgtgtttcctcccgtgtcaaacgagagggccccaaattgaccccaaatgttttttcttcctttctcaatccaacatttataccagcacgttatttccaggatgcccaggacctctgctatggttgtgctgctgtccctgcaaaggcgctggggatggccgaggtgggggatgtctctgggggctgaaatacgctgccaggggaaggggcgccccgataccaccctcagtggctgctggttgggcgaccggtggccctggcttgagaaagtgaaaatgtccaatctattttgcctggagccttgggtctcttttggatacggaaccgagcagcagtcctccacttcgccctctcccgccgctgcaagggaaaaggtcgttttcctcgagtcccggagaggccctccaggaacccagagccccccggggacaccgcccagctcccggcgcccggccccgcccctgcgcgaactcggccgcacccactttcccgggcggctccccctccgtggcctgtggcgtcacaaggcccccagccgcctgtgccccgcggtgcgcgccccgctccgggacctgccgccaccgccgccccgccctcggcggcacccacacccaggcgcgcccgcgcgcgcgcccggccccgtccctgtctggaagcacagctgaagatggcgagcccggcgcctccggagcacgccgaggagggatgcccggctcctgccgccgaggagcaggcgccgccgtcgccgccaccgccccaggcatcccccgcagagcggcagcagcaggaggaggaagcgcaggaagctggggcggcggagggcgcggggttgcaggtggaggaggccgcgggccgggcggcggccgcggtaacctggctgctcggggagccggtgctgtggctgggctgccgcgccgacgagctgctgagctggaagaggccgctgcggagcctgctcggcttcgtcgctgccaacctgctgttctggtgagagcttgggcaaggtgggggcgctgaggagggcaggtgaccttggggcgcccggggccccggggacccagtgcagggggagcccgcgggacactgcggaggaagaattgtcagccctgccccactttctcggccacctgtctcgaacaggtagacactcaccgcaactttcctccggacgcacgtccctgtgagcagttgtcgttctccgtgtgcggatccagcctcagatgcgaggtggtcggccgaccctcaggcacctgcacctacaggtgttcccatcgtgcttgaaaacttcgcccctgctttctaaaactctgaggtcttgacctgctcgcccaagcttgccggagcaaacgtgcttgaacgtgtcttggttcttgcagccccagcaggcatatctggaccagattaggtacccgttcaaaacggtgccgcattcatcagtcacctgagatgggccctgaatgatttgttttttccttcccctggagcgttaggtttactgtgtttactccctgatgagaaaacgggaggcaaacaagcaggtggagtatgcccagcacccacccccgggtgtgcacagtgtggaaaacaggcatatttttaggtgaagtacagggagaacacacgggaatgctcagcccctgagcaacaggtttgtctctccaaaaagcgctcttcagaaaggccagggaaatgtctgtctccttcgttgaaagtggtgtcctgtcatccgttaccacgctattgagggcggagaaaaaccttctttgtttgctaagtgtcctcataacaaacatgacctacacagtgcagaataatcagactccggtaacagataccttgttacaggacagagatttctgaaccttaaagttgagaaataaataaattgcacaaaatagacagcc

SEQ ID NO: 84 - DNA, 6000 bp, Homo sapiens
ttatgcagttatataggcactcctccaaaatcaaaaggaagcctggagaatcaagcttgagctggaacaaaggaagctggtgcatggccaagatcttgccaccaagaacagtcaacctaggatgccattgctgctcttaatatccctggacacttgccactacactgcagaattctgctgcccttggtcactctctgctggctgttcagctctcaactccacaacggccacttctaataatctccagttgaacttcggacattgtatcaccccttagagatccatagtatagctgtgtcagtccactggaaggacatgtctgctcaccttttgggttcatagacagtgcccctccccatttaggggcaaagaagggaaacagtgtaagcaaaaatattatttcaatgaaaatttcctattttatttccaaagagattgaccttagtgcgaattctaaagaagtgcacgcagaatcagaacgatttactatatagaaaaatgctttaagtcttttaaattttttgaatagggttgtcgtttttattaatcgttagccattaaattataatataaaaactgtataattataacataactttttgttttgagaaggagttttgctcttgttgcccaggctggagtgcattggcgtgatcttggctcactgcagcctccacctcccaggttcaagcagttctcctgcctcagccttccaagtagctgagattacaggcacccgccaccacgcccagctaattttttgtatttttagtagagatggggtttcgccatgttggccaggcagctctcaaactcctgacctcaggtgatctgcccgccttggcctcccaaagtgctgggattacaggcgtaagccaccgcgcctggccaattataacataattataattagttacaatgatatataattgttcatgaagttataattcatatttataattgccttgcttaagctaacagttgataactattgaaatctatggagaaaaggtgaagactgctgcactgcttggtgtgtgcctgccatctagtggcaggacacattaatgctaccgtgaaagccctagtgtgcctgaaaggcaggtttgccagggacagtttgctccactttacattgtcccagtgtttcgacccaatcaactgtatacagagacatccttaggcttttgaaattatctcccattttattcaatataattacagctgaattgcaaacataaatctctgacagccaaaacatatctaagcattacttcattcctacattccctaagcgcgattccttttcttttattttatgtatctccagaaacaaaaagtggtttaggcatgctattcttctcccacagagaatgttttgaccgctattataaacatgcacattgacactggagtcactgatgtcatggactgctgccttctaaagagctcttctcccccaaaagagtgataagattaagtttgagaaaataatgaaagagaatctatcagtattcatgcagaccactctagtaaggatgggagagccattagtaaataagatatagatccagacctcagcttcattgcttccaatccttgtaagatttagaactccttgtatttgtgaagtatcataccctcttagcaaactcaagacaatcaacgtctcatatacatgagactaatacgactgacctcatatcttgttgcaatgttgccctctaagaacccttccaaaaggaaggagtaaatatcaagcaagtgtcctaatagtttctggtaggtgttttggctgaaaagcttgagatgaggttggcataggcaacattaagggggatctgtgttctctagcagcaggtgcgtccacgccttcctgggtttggctagcatgctatgtttgattcatactatgcaagggactatgttaaaatggtaatctggatctgcaggcagaaggaagattagcagtattaatcatgaaagtacggcagacttgaggtttgggaactcaagaatttgggggactgggctggagggagaggaggaacgtttaaggttcctgggctgggcacggtggctcacacctgtaattccaacacttccggagaccgaggcgggcggatcaccaggtcaggagtttgagaccagttcggccaacatactgaaaccctgtctctactacaaatacaaaaaattggccgggcacggtggcgggcacctgtaatcccagctactcgggaagctgaggcaggagaatcgcttgaacccgggaggcggaggttgcagtgagccgagatggcggcattgcactccagcccaggcaacagtgcgaaattctgtccgccccccccccccaaaaaaagagagattccttcatggggcaggaactgaaaataagagttgtgaaaatttgagaggtgaatgatgttgctagaccgctgagtgcaaggagcatacaggcagaggcctagcgaggatggagtcatggtcattagggactggatgaacccagcaagggggcttttctcccgttctcagtcactcccctcacccccctccttgcctggctgtccgctcgtctcttctcttccttagcgtcgccttcttcctcctttgctgtggctggctttctttttcataagtggtcatatcagtttaatcacagttatacatgaaacctacaatttcttatgcttattgaacatttaaattaaaattcgtgagttgaatcttctgtatttctaaacagtaagtctctagtgaagtttcttcttgtctatgaccttcaaattattttttctgtttatgtagtcctaaagaaaaagaaaataaatcaaaggctctctatacctcaaaataaaagctctccttccactctcatcaaagactagtatctagagattggctactcaccaaagagcttacatttgtgcgtgctgcttatgcctaattagagactacgcagagatcaatcctgttatcttgtggctgtggagatgcttcttcctaatccagactttttctgtatttaagataagagaacttgaaaaacccagtaatagtagtatccttaaaatggcaataacaaaaaaaagttgaaaatatttcacaaatatttattataaataggaacaattaaacaacatcttagatgagtaataaaaatgtagctccttcaaagatatgacacctgcatacttttccaaaagggtagatgatgtgaaaactgggcagaatgctattccatttccgatttcaagaccctgtaggactgtgagaggaggaagagcacagggcatcgtcgcatccaggatctacagaggcactatttgcactttctccaccgtttccagtatggaaaatccgattccttccttttcataccttgatggtctctattgaccttcagtcactgatttgcttctctttgtgagggtatttcagtcccaggaggaagttttaattcctgttttttactctcttctgattgggggggaacacaggattaatattcatggaaaacattaaggaatccagagaagttttatttttacattaatatacagaatatccacagagaatataaaaggctacagcaaaatcaagtgattcactgggacataatatgtctctcttttcaattatttaaagtcccacagaaacttgactgacattttctatgcatttttgaagagaaatggaaagagatgtggggtggggggctgtaacatagtagctatttcgggagagattagcttgttgtgtaatccagtcacagaaagataatcgcagacaccagagctaaatttctttgactgaattcatgtaaatcagtattttttttttacttctacacatgaataagaagtaatttcattcactgtggttgctgtgtggtgtaaatacacatattcactaatgttaagaaaaattgtgcctattatgtatagtagtgatgcacataatttacacacactcattgattgaaatgtttccctgtggatcaggtgcgttcataatcagatgaaggaaaagcaaaggaggcatttgtttattttccatttcgtgaatcataaaatcagaggtttgggctgactacctttaggttcccttacggtgttttttgggaaccgctttggagtcagctatctgctaagtttggaattgccaccacgaaagtaaacaccgtagtgaggagcgggttgaggaaaagaataaatagttggtggaaggaaccaccgtacttgagggaggggacagtgggaacggcccctgtcacaatcatttatccaaagcatcaacattctcagagcaaagaacttgtgtttctaactccagaggtgcctggattcacagccaaaaatgcttcttcctcgctctccacagcccctcccatgccagacgccggctcggcaccccctcttcgctgtgcatttctgcttcccccgaaagcccgagtagtaaagggaggctccttgcggcccccgcgggctcccagggacccgcaagttgaagcgcgagggttccacgcgggctgcggggacgcgggcctcggtgctgcagactttctcagggcgcctgggtcgcggcaggcgcggagtcccgagcgcagcagctgctccgccggcctcgcctccgacccccgccctgcgccaagcgcggaagcgctcgcgacctaactgccccgggtgccgggcgcctagggaggggccgccaccgcccgctccgccccgggggcctgcgcccagcagcccccgcctccccggaatccagaggccgagccggaggcggcggggccacggtgggagcccgcgaggtggcccgagcgagggccccgcatccccgcagagcccgcccgagggcgcagcctgccacgccaggggaggcggccgggcggcggggaacggcgggggcggagcgcagcctcccgacgccgccgcctcaccgcccccctccgcctcctcggcctccgctcgcagccgccgcctccgcctccgccgggctgaggagccgggagtccgccgcgccggctcggggctgcgggatggggagttagcgccacggcggcggcagtggccgcagcgcaccccgccgccgcccaggagcccgtccagccaggggtgccgggcccgcccagcccgccccggagccaggcccgcgggcggcggcggagctgggcaggtggatgcggctggaagatggcgccctcgggcccgggcagcagcgccaggcggcggtgccggcgggtgctgtactggatcccggtggtgttcatcaccctcctgctcggctggtcctactacgcctacgccatccagctgtgcataggtgagtgcgccccccgccgcggcgcccccagcgcagcgcagcccaccccgactgtcccgggacgctcagccgctcctccgctctcgccccccggatgcgccccgggcgctgccaacctgccgcgtcccgccggctccgccgctaaaagcagcctcggggcagcttcttccacgcgcacgcccctcgccctcccctcccaactctcgggttaaggtggcgcctccgccccgcactcgccgccgagcctcccgccgccttccgctcaccgccgccgcctcggccacaccccctagaggggcggaaggtccccgggaccgctgtggagaggggaggccgaggccggcgaggcgcgccgggggctgaagggctgagctgggcccggccccgagctgcgccagacccgcgcgggggtgctggccttggcggcggagctggatcccttgctggttggcgtcaatgcacttgttaaaaatttgtgacagcgctcaggggcgtttttgctgcctttatgatttgaggattgccagttggacacttttctagtttaaaaggatgtggaggaggtgagctactagaaagtatttttgaggacatgtgcaacacactaaaccataatttaggtgtttgaacagtagggagagaaaaaaagaggtgatcgtctgaggtttt

SEQ ID NO: 85 - DNA, 6000 bp, Homo sapiens
gcattaggtgcctcaaattctacaaaattaacacaagtcactgtgagagctcagtacacttctcaaagctactcagccaatgcatgacagataaagactcaaaatcaggtcttctggcttcaagtctcacaatcttttctattacttcattccaggaaattgaattctagttacgaaggcaaaactaacaggtaagaaacaatcaaaagcccacctatgcgatgggtttataagttcagtacaagggctggatcagcatgggctggaagatttaaaggaaaatgtttgggaatactttttttcacatgaactctacatggaagtgtaaaacaagtatatgagctgttttgattggagctagggtaggatcctcccagagcccctttcccactctatgcaatgaactctcctcagtaacttctcagccactagggctctaccgagtagtttggaagccaatggactaaatcagtagttctcaaagtatagtccctggactagcagtgtcagcaatacctggtaacttcttagagatgtgaattctttgaatcagaaattttggagatggggcttaataaactatattttagcatgttccccaggtgattctcagacttgtaaagtttgagaaatagtgaactacttcatctccataaagtaggaagggacgccacctgctttaaaagaacatttgagattgggattggaaactttgaagggggtagggaaggtctgggactgccaataggaagccttctctcaaatagcagagatagatgatagggatgaacgtcctgaccaaggctagaaggtgtcagtatgcacacccagtaatcctgtcttgcccctaaacttctcctgcaatacctagaataggacagaagacagtgggcatttgaggtcatctatacctggatagaaagtttaaggaaaagaggggtctaggaggccacgttgaagtgactggccaggaagggaccgaaatcttgatagaggaaatgaataggctcagtaatgtcagagaatgggagaagtggaatgaggaggcttaactaagcctatggggacggagaatctccatgtctgagatctcagtgctgacaaaatcctaaattacatcaaagtccaagatctggctctatttcatatttccctgtggaatttatgttactgaatagacaaacttgtataaaaacaatttctatatggtataaaaacccagacaaaagttgcagttttctacattcaaaaatatttttaatgtttttatttttatctgtttgtgagaatttgtaagattattttgttttgtttttcatatgagatggggtctcactgtgttgcccagtccagtcttgaactcctggcctcaagtgatcctcctgcctcagtctcccgagtagctggaattacaggtgcatgcccccacacttggataatttctgtactttttatgtgttggtgtaacattgtcttcgtcttttcttggaaagggctatatgtttattgttactgtctttaaaattgtggtaaaatatgcataacataaaaattaactattttaaccatttttaagtgtacagttcaggtatacttttttagtgccaaaaatgtcattcttctataaaataacaaatatactgtgatgggggagggggttgttcttactagaaaaattaagaagtcgttacttattttgagtccctaacttggtttcgaaatataacacgggactaagaaattcaggaatcaaacaactactgccctaaaggagagttgagatttacagggttaggatggtcaggggtggaaagtggtaagaacaagccagtagaaagaggaaggtgcagggcatttttaggagtgtgcagaccagacttgctaaaaacaaagtgcgcttgaaaaggaacagttagaattaagttttggtccattttaaaatatttaatacctaataatgtttggttcatagcagaaactcaataaatatttgtcaattgagtgtagtgaaagcttgagtgagattcagaagagccagaaaataaagtttaaatttcattttatagaccagaggttcccaagagatgtaccaagaatgggcagccaacgtgctaagctatcgatcacctttcaaaggagtcaggcagaagccagggcatctggtcaactctaggccaggtatgttctagtatgctgtacaagtacaactgtctatagatgtcattggtggaagacaataggaagcaatggggaaccactaaagataattgagcagtggagatataagatggcagcaatatttccaggaagactattgctgtggttttaatgttcatgtcccctacaaaattcatatattgaaatcctaaccctcaatgtgatggtattaggaggtagagcctttggggagtaatttgatcatagggcagagccctcatgaatgggattagtgccctcataaaacaggccccagagaggtaatttgtcccttctaccaaacagtacacagtgagaaggcaccatctgtgagaaagtagcccttcaccaaacaccacatctgctggcaccttgatcttagacttgcctccagaagtctgagaaataaatttctgttgtttataaactacccagcttacagtattttgttatagcagcccaaacagactaagacatctattaacctcgtgataaagcaagagctggatcccaggctcaaagctggaatcactgggactcccaaggtatatattatagacatttgaaaattacttccccaaatttactctccctaaccccactttttaataataccgtaaaacgttccacaaaatggcctaggtgaaattgattatactctcacccccatgggtgagcgctgattggcttaaaacaactagcacctttttccccaggacccacagacattggttcagaaatgggcgcataatccagtcagggatttttttttttatgagaactcctaagaaaaagattcctgtacttctctctgaagttgagccagaaagcatgtacccctaagggctgttggcagccatctttggacaaaaaccagagagcctgaatgagaacagaggaggtgcagaggagaaatagtgaaagcaaaactagatccaggtgtcagcatttaaaatccttgatgtcttagccccggactctccagttactacttaaattcctgtttctgcttcagctagcttgggtcttgttttcttttacttgtaactgaggttaaagtgatcctcagaataagaggggaaaaagtggacccttgtggtaatctagcactctgggtagacagtagctgttcaaggaaaagagaagaggggtgcaggtggctacacagaagcgattagccatcaagggacgagggtggcattgggatgaaaaaggaagggctggctctgagcttcaccatgaaagaagtgcacatgagaatggtttctgtcgggccctcactttggttaattctactgctttctcctcagggatgatgaaggcccccagctcatccccagggaaatgatgcaaccaggtagctggatcagaaatgaaaaagtcaggaaaagggaaaggttgcttgcgcagttactagggatacgaaaaggaggctaaaaaacggcagggggtggcctggagggaatgtgaaacatttttgtgtgttttacacacaccgaaaaaaaaagaggacatggacagaaacctagagaataggaggacagcatagtatagttactaagaataagctaagagttggttccccgggaccaaacagataccatttccaaaacccacgaattacttaccggctgtctcaattcacctaagcttccctttcttgtctgtaaatgagcatgaaagtgccacctgtataaaataactcaggctcccaaaatgtaacatagggaagctcctagcagcgtgtctgggaggaataagcattatctgtatttatcgtatcaaattaagatagaggaacacaggaggacagtagaggatgaaaataaaacactacttagatcctgaccctcctcagtggcaagtagtgagcattcacttcgtacagaagtagcactaaggcaaattaaaagaaaggttcacatttcctctaaaagaaatggtttttgagtcatgccaataccacttactcaatgtcctctgtactatactattctctgacagagccacttattaaatgtgtgaactgtgctgacaacacttgacaactttcaacatgagggaacagcaggatcacttaacagaacaaaatcgtaaaataatgtcaaagcttgatttcaggtggtgcggtgtagcactgctcttcacgaaatcaggactcccccgaccaggcagggccgactaggttagagtgtcctgccctcactcacctggcagggcttgggatgagctggacgtgactgccacaggcatttctgttcaaccttgaagccttcgctacaggagaccgcctggcagtcgggctgggaagcaaatctgagaaacaaagagagaccaggcggaaagcccttgggaccaggaaggagagatgagattctggtttggcagtggcacctggtacccgctattaataaataataggactgtctgacatttataaggcactttatcggtaataacagtgtcatctccataagccattctattagtggtaacaaataatagccccacgcctgcaatatctcctttaatattcccaacgtccgctaagcgcgtctcatcaccatttaaagaaaccgtggctcctagaggtaaagtacttcggtcacaacgcgaggaggtccagacttgaccccagacctccagactcgagctgggaagtggccgaggctcctggtgagccgcagggcagcctgcccagccccgggaggaccgcgtgggagggccgggagagcaggtggctgccccccacaagggggcgggctcagccggccagtcctgcccggaacccccggcaacgcgcatacgactacacctgctccggagcccgcggcggtacctgcagcggaggagctctgtcttccccttcatctcacgcgagcccggcgtcccgccgcgtgcgccccggcgcagcccgccagtccgcccggagcccgcccagtcgccgcgctgcacgcccggggtgaaccctctgccctcgctgggacagagggccccgcagccgtcatgctttccgccatctacacagtcctggcgggactgctgttcctgccgctcctggtgaacctctgctgcccatacttcttccaggacataggctacttcttgaaggtggccgccgtgggccggagggtgcgcagctacgggaagcggcggccggcgcgcaccatcctgcgggcgttcctggagaaagcgcgccagacgccacacaagccttttctgctcttccgcgacgagactctcacctacgcgcaggtggaccggcgcagcaatcaagtggcccgggcgctgcacgaccacctcggcctgcgccagggagactgcgtggcgctccttatgggtaacgagccggcctacgtgtggctgtggctggggctggtgaagctgggctgtgccatggcgtgcctcaattacaacatccgcgcgaagtccctgctgcactgcttccagtgctgcggggcgaaggtgctgctggtgtcgccaggtgagccccgaggatcgccctgccctggcaccagggcttctcggcgccttgactgacgagccacagcgtggcataaggggttcgcagagggaggttcagatcggaactgtaggtatagaaaaaggttggcagtgtttccttgaatcgcaaataatgatcttttaggaccacctgttgtggaagctgataatgtgctaggttctgtgttaagcactctacaggcagtgtggtttttaatcctcacaatgggtaggctttgttataggacttttatagatgagaccactgaggtcctgagaggtgaagcctcatgcccagcc

SEQ ID NO: 86 - DNA, 6000 bp, Homo sapiens
aatacaaaaattagctgggcatggtggtgcatgcctatagtcccagctactcaggaggctgaggtgggaagcttgcgtgagctcaggagttggaggctgcagtgagctgtgattgtgccactgccctccagtctgggtgacagagaaagatcctgtctcaaaaaaccgaaccaaaccaaaacaaaaacaattaagtgccgggtgcggtggctcacgcctgtaatcccagcactttgggaggcaggtggatcacttggtgaaatgccatctctactaaaaatataaaaaaattagccgggcgtggtggcaggcgcttgtagtcccagctacttgggaggctgaggcaggagaatcacttgaacccaggaggcagaggttgtagtgagccaagatcacgctactgcactctggatgacagagcaagactccatctcaaaaaaaaccaaaaaacaaaaacaaaaacaaaggcaaaaacaaaacaaccaaaaaaacccgaacaaataaaaaaacaaaaacaaagaaaaactaagtgcttgtcacgtcctaactcatttcatcctcttagtgatcctattaaagatctaggagaggccgggtgcggtggctcacgcctgtaatcccagcactttgggaggccgaggcgggtggatcacgaggtcagcagttcaagaccagcttggccaagatggtgaaaccccatctctactaaaaatacaaaaaattagctgggcgcggtggcaggcacctgtagtcccagctactcaggaggctgaggaaggagaatcatttgaaccctgagggtggaggctgcagtgagccgagatcgtgccactgcattccagcctgggtgacagagtgaaactctgtctcaaaaaaaaaaaagaaaaaaaaaatccaggaaataagaaccattattttccccattttacagctgagaaaatggaaaactcagataactcaagcaactggcctgaggtaacacagcgtttgtttgtttgtttgtttgttttttttgagacggagtttctctcttgttacccaggcgggagtgcaatggcacgatctcggctcaccgcaacctctgcctcctaggttcaagtgattctcccggctcagcctcctgagtagctgagattacaggcatgtacgaccatgcccagctaattttgtatttttagtagagacggggtttctccatgttggtcaggctggtcttgaactcctgacctcaggtgatccacttgcctcggcctcccaaagtgctgggattacaggtgtgagccaccatgccaggcctttttttgttgttttttgagagggaatcttgctctgtcacccaggctggagtgcagtggggcgatctcagctcactgcaacctcagcctcctgggttcaagcgattcacatgccttagcttccagagtatgtgggattacaggcatgcgccaccacaagcggccaatttttgtgtttttagtggagacggcatttcaccatgttggtcagcctggtctcgacttcctgccttcaagtgatccgcctgcctcggcctcccaaagtgctggaattacaggcgtgagccactgcgcccggccacaggtcacaaagctattgagtaaagaaagctgcatccagcctctcaccttaagaaagccattcccctttgcctcaaagtgaggctatacttccagaaggactttgtctccggggaagccttggctttggaattcaggcccagttctaagtttaaaatcattgatgctgttcagtagtgggatcaatgattttgcttcacttaaatgccacaagctccctgaagatgggctggagctgtcacagcatccagcccctccccttacccagaagtaaatactcttatcatagtcctccgactattctatatccttccatttgagtgcttcttttatgccgagggcactattgagatgtagcttagagaatgaaattcctggtgttgcagggagctcagatccacccgggaaggttcatgagcacttcatgtcagcagcctttatttcatctaacgtttccatagagtgaaggaacagccacccattacaaaacaaattattaaaagaaaaattccaaatcttcaaaggagagaggcccatggtagtgagcgctcccacccccttctcctttctcttcccatcaccaacgggctagcagcacaatttgtttcttgaaacttttgggggcatcggagttctggtgtcctcatttttcttccttcccattgatgtatcattactagagtgaaaaaagaagggcgtctcgagggcttttgaaaaaaaaaaagggtgactactcaagacattttgtaaaggggggaaaattgcgaagaaaagagacctcagtagggggtggaggaactgtgaatgtgtccttgtctggcggttctttcagctgaaacctggtgctggcgttcgcagttcagttcaaactgtcacctttagttcttactggcttttctgcccttgccccagaacctcaacagattggggcttatttacctattcacactccgccgtggaagctcattaataggctttattagcaacaccattcatgggaggccattgacgaaaggggttccagccacttgaagagggaagagaaaagaaaaaactgtaaagagattattttctcattcagaagcctcagtggtgtgaaggttttcctggatggtctgaggtcacttgaagactaaatatggggacataattgattttttaaaaataattctaaacatacttcccccccctcctcaaaactgaagagtttcctgttgtggtcttgtgggtttcagtcccttatatatgagccctctttagggaataaggagcttttgatagattggtgtcttttcatttctataaaaaatacattctgcaaactgtgcctggacatgaaagtaggtgttcttatttgtcattttcagcggaaagcttcctttccattcaacatgcataaagctattgatgaatgggggatagggacagcggcttcctgcaccattaatttatgtgagaatgtgttaacagcattttcaatggctgatggatgcggtgtaggatgggaaaggaactgtcctgagacactcgagtttcccattggtggggaatataaagatgtaagtggcaacctgcgagcaggcagacacgttcagctgcatcccttttctgagaacttgaaaacatactgctatcagaacaacccgtgtgggagtgaatggctaagtgtcaacctgggctgaggtgtccgttaatgtataggctctggggctaatccaggttagaggacttgaccaaaaacataccctcccaccaagcatatagagggataattttgcttaagaaccagtttttattttgttgctatcaaatttccaaaatacaatgttatagccttttgcctgaggcagttaaatggatttcttacttgtgtggcttttaaataacttgcataaacgttttctgtgctatatttgtgaataaaaatgattttctaatcatgtagcaccttgaaaaatatttttgtaaatgttatgaagggtgcaatgttagtgacacaggtgcaaatatgtttctaaatccaggaaaagtctgttttccaagtcaggtttgttctcaatgcttcatctatcttcaggcctcaaaaggattctaaagcatttctgggtttagtgaccttttctaaagaaaaataattaaggttttaatctatatggtcttgaacttaagcacggctgctcaggagctggatgaataaggagggagaaaaagcatatttaaaataaattattccgaagacacggcttagtgaaaaggtaaatggacataggaactttaaccagttacagcttggtgtgcagttgaagaatcagattttgcatttatgatttttaatctaagattcagagggaggaattactttgttcaaggtctatttatggtagagttgtctttagactcctttgaatttctttttattaatccaaacatatattattaaacactttttttttttgatgcaattttggctttttctgagagagccacattcaaagtcaggctgtcctagtagccagctgtgtggtcctaggcaaattacttaacctctctgatcctgtttccttatcagaaactgggaatagtactctgcagggtggttgggcagatgaaatagaatcacctatgtagtgtgaccctcccatagtagggcctccattaatattcagttttttcctctcatttctattgtttagaaggacagaaacatgcaatgtcctgcgaacatttccaagtggcttcctctcctccaaaagcttcagctgcctggcaaccctccccgcagtatcaagcaggcgcattttaaagtctctttagcgggagggcagggttagagccttcggtcatttgttttctaacttgacataaaacaacgtaacgcagtcgctcagcgagccgttggccagcctcgctcgcccggggaggagggaggaggtggcgcggggcgcgggaccaggccttattcggaggctgtcgctgcatccctacggccgcatcgcggccgagccctcgcctcccgggccggtgtctccggctgctcggaggcgtcgggagccgcgcgggactcggggcggcccgggcgcgcggcgctgattggcagagagggcgccgccgtccaggaaacggctcgggtttcagtgggggcgtgacccgccgcgaggaggcgggggcggcggcggcggcgcgggcggcggctggaggagagcgcggtggagagccgagcgggcgggcggcgggtgcggagcgggcgagggagcgcgcgcggccgccacaaagctcgggcgccgcggggctgcatgcggcgtacctggcccggcgcggcgactgctctccgggctggcgggggccggccgcgagccccgggggccccgaggccgcagcttgcctgcgcgctctgagccttcgcaactcgcgagcaaagtttggtggaggcaacgccaagcctgagtcctttcttcctctcgttccccaaatccgagggcagcccgcgggcgtcatgcccgcgctcctccgcagcctggggtacgcgtgaagcccgggaggcttggcgccggcgaagacccaaggaccactcttctgcgtttggagttgctccccgcaaccccgggctcgtcgctttctccatcccgacccacgcggggcgcggggacaacacaggtcgcggaggagcgttgccattcaaggtaatcgccgcgcaagacgcctcggggagcttcgccagccggggacgtgggcgccacgggagcccgggacgccgggtgcaccgtcctccgggcggggggcgcggaaggactagcattgtggaggacgctccgtgtcctccctctgtggctgcataggtgatgggggaggtgggtgcgtgctgacggccggcgttctggaagttctgcctctgctacccccatccagatgctgacatctgcttctggcgttgacgcccccctccctgtcaaaccctggcgggcgcattcccgctgactgggcgcgtttctccgaccccagagcagacgggcggaaggttcgcctgcccgtggcacagccccgcaggccggttcccggggtcatctccgaggtgccccatccgtgtgtcctgggaacttccgtaccatccaggccctgcggagacccctttttcgggagggggccgctggggtggggccggtgacatcccgtaggggtggcgatggccaggggtggcactgctggggaggcgacggctccggtgcctgggcgcccctcgcccgcagccgccgtcggcgctggagggagcgcagtgcgcctggggctagggggcgaactggaccgactttttctagttcgcctgcctgctctgccgcagcggctgggagatgtcgaaagcgcaggcgagttctaacttgcgcgctcatttttttcggccacggggccg

SEQ ID NO: 87 - DNA, 6000 bp, Homo sapiens
tgtgcccacccacccagcactggctcagcagaggcacctctgcccctttattctctgatcttttgctccaccatctggccctctgccctctagcctcctgccctttgcccccacatttcagatccttcacccttattccggccatagaggactgtggctggcctggcctaggtccctgtgaccctggagagcagggggtctagcccagtgatctctgaccatagtgatgcagctcccacttatgacaccttaagctcctgccctatattctctccctgactctggaagctttctagctttaccgcttctattgatccacactctgtctctgccttcctgccccctgaccactgccttctaccctctgccctggctgcagatggaggacctgtatgaagacttccacatcgtgaagctgccgctgttaccccatgaggtgcggggggcagacaaggtcaacaccttctcggccctcctcctggagccctacaagccccccagtgcccagtagcacagctgccagccccaaccgctgccatttcacactcaccctccaccctccccaccccctcggggcagagtttgcacaaagtcccccccataatacagggggagccacttgggcaggaggcagggaggggtccattccccctggtggggctggtggggagctgtagttgccccctacctctcccacctcttgctcttcaataaaatgatcttaaactgctgtattgttgacattgggaggtgagggtaagcacctttatgtacagttgcacaggttgtgcactggacagaagtgtcacatctagaggggcccattcacaacagagacctaatagagatgcatgtttattgtggcaactttggaaggagggtgtcttgggtgagagatacctttgtctcattctgtgtgggttaaggtgtccctgttgggcctgtgaagcctggaatggaagacagaggcattttcccacttccttggaggctcagagcgtgggaactgggaggccccttggccagccccaggctggtggggagcagagcagattaggccggcagtgggcccggcactgcctgctgtttggtttgggaattagtgggcgccctggggagaggccaggcctgccagactggggattaacagtctccaccccccaattcctgcccccatgggatggcatcagcccctcccagcaaagggctgcagcaagggggctggttagtgggcagggtgacagaggactccggctggaggggctcctgaagtctcatcctgactccagagcggtctcaggctgtgggcacacaggcctggaaggcacctagtggacccccttatcccctgcccttcgctcctccctctgccactgcctgggctgctattgttgtccccacttgggagactcaggatggggtatgaccttgagagtttacaagttccaagccagagctggctaggggggacagaaagggggttcctgaggacacacgtgagtcggtgttcaggccgggcgcggtggctcacacctgtaatcccagcactttgggaggccgaggtgggtggatcacttgaggccaggagttcaagaccagcctggccaacatggcgaaacctcgtctctacttaaaatacaaaaattagtcgggcatggtgttggggtgcttgtagtcccagctgctccagaggcttaggtgggagaatcgcttgaaccccggaggcagaggttgcagtgagccaagacagggtaagaccctgtctcaaaaaacaaaagtggtgttcaggtccagtcatggtggctcacgcgtgtaatcccagcactttgggaggccgaggcaggtggatcacgaggtcaggagttggaggccagcctccaactactctctactaaaaagacaaaaattagtcaggcgtggtggtgcccacctataatcccagctacttgcgaggctgaggcaggagaatcacttgaacctgggaggcagaggttgcactgagccgagattgcgccattgcactccagcctgggcaataaagtgagactccgtctcaaaaaaaaagtgttcagacccagagtctgggtgtgccagggtgtgtgtgtaaggggaaccccaccaggagcctagacttgtcactccaactccctggggtgtgcacaagcaggtgtgggcctgttggggtggcatgtgtaaacaaacacgatggtacagccggctccgcgccaaactgccaggatccaaatcccagctgtgctacgaacaagatgagatgtgacatcggagcctcagtttccctacttagatagtaagatgaccaacttagcatgcccgtaaggattccatgagatgaaacacgcaaggcgtttataccagcaccagacaggaaaccgcaagaaatgtttgttatttttcgttgtcacaattagtaagcatatcaaatagcccaggaagcctgcccccagcccctgcgggaattcagcagtcggaagtgtgtggggatgcgggtgagctggggtagggaggatgaaaaggaggagcgggcttcagtgaatgcaaggacacttcctagggagtgagggctgctgatcgagaactgagctcatcagcaccgagcctgccaccgccttgccaggttccgcagctgacggcaccgccccagctgccccctcgcccccatttatgggctgtccggcagctggacagcgaaggcatgggtcacagggtgaccagcccaggcgggttcctaattactccgggcagggtgaacatctgccagtctgggaacacggcgtcccagcctgctgggcttggaacctcgggcggggctatgtagaatgcacgaggggctcctgagcactctaggatgcccatcccagggtttgacccctgaacttctgcccctcccacaccaatctgtgtgttaatgttcttcaggctgggcaatggagggggagtgggtactgtttgtaccaggctgggagtgtcccctttagaggtgtgtctgtgaagaatgaacatctgcccagaatccatgccaaatgcaggacaaggttttgtgtccccaagcttgtgtgttcatggcaatgctgagagtatctgagacctgtgggtgtgggtgtgggcctgccgccgggagggagcgttggaaagggggttgccttcacatattggtgtacaaatgctggtgaatttcaccagcggtgatagctaggggacccttgagggaggggtggctgttgtgtgtgtctttgcaagattggtgaacctcaggccccgctctgagcctgggattgtgtgccaccgcactgaggaaagggtttttgcatttggtgtgtgatcatggctgcatctttgcacagggaagatcgggagtaaaacctccttgcagtggagtatgactgtgtgtgtgaaggcattctgaggtctgggtggggtctggcacttggctggttgtgtgggtgtctttgttacatggcgtgatcatgacggaattcagaccgttgggagagccgtgtgtatgaaagaggagagcctagtatgtcagggtccacctgccttatatatgcgtgatggaggcaggaggggtcgaggtaggtgtgtcttgtgtgaccctggaaggttctgtgacagtgtgtactgctcctctgggtaaccatagttatgtgaggctgtctttttgttttttcaatagagatggggatctccctatgttgcccaggctggtctcgaactcctggctcaagtgatcctcccacctaagcctcccaaagtgctaaaattacaagtgtgagccatcgtgcctggctgaggctgtcttaagagcagctagatttgcttctgggactatgatgtgtgtttctgcgtgcatctctgtgacactgtgtgattacaggtgactgtgaagtgacccagcctcactgagcagtgtgtgtgtttctgggactgggaaaaagaccatccctgcctcctcccccaacctctgggttccagatccctaggacctgccagtgagcgactgggaggggaacagggaggggcgagggaggacaaggcggatttctccccccgtaccaggtaacaaacttgtgggactccaaacaaaattctgaagctacagcctagccgagggaggaggaccaggaaagggaggcacgcccactccccagccccacccaacgccaaagccacccgcccattccatccctgtccctgtgggtccttgcaccggccaccttcaacacaggtgagatgagcccaggcttggggaaatagggggccctgagggaagagggaacctgcgggcaggaatgcatccggagtcctcccggggcggggagtggagggcttggaaggctggaggggaacggagagaggaaaggtcaaggcggatccgggaggaaaagggagtggggggagccagggcaattaagcagaaggtgcacaggctggggcaggggggctaggggacctggaggcttagggacagggcttcagagggagtgcagggagcagaatgggtcaagactgggagctggggaagtggagaagggggagccagaaataggggctgagggagagaatttgggagaggtggagccttgagaacctagaaactcaggtgctggggacttgcggaatggggcatgctacaggtggcctctgggtgaaggggatcgggcagagggtgactcgggagctgactgcagggactcaagggtcttggtggtgggggacggcagttaccagagcccacggccaggagtccagggaaggggacagcctgagatgaaggtcagggaggggcactgggggctggactagactgagtaaagctgggaggagaaggcaactcaggcaagggtcaggactgaaggggtggcgggccggaacatgggtggaatccctgtgctcagttatccccgcacctctccacccacacccgcagcccccacccgggccacccactctcccttggccacacctgccgggtgccacgatgaccgtcacctacacagcccgagtggcgaacgcccgcttcggtggcttctcccagctgctgctactgtggcgtgggagcatctacaaactcctgtggcgagagctgctctgcttccttgggttctacatggcgctgagtgctgcctaccggtgaggctgccctgaggtgctcatgttctagcggagggggggcagctattatatatatataatatataaaaattataaaaatatagagatatataagtatatatatctatgttttttaaactgagatggagtctcactctgtcacccaggctggagtgcagtggcataatcttctcttacttccacctctgcctcccgggttcaagcgattctcctgcctcagcctcccgagtagctgggattatgggtgccagccaccatgcctggctaatttttttgtatttttagtagagatggggtttcaccgtgttgaccaggctggtctcaaacttctgacctcaagtgatcctcctgcctcggcctcccaaagtgctgggattacaggtgtgacccatagcacccggctgggggcagctattataaaagaagccagggtgaggggcacagcaagagagatctgaagctggggatggagtcacccttgtgacctgtgacccctcatctctatcccgcagctttgtgctgaccgaagggcagaagcgctacttcgagaagcttgtgatttattgtgaccagtatgccagcctcatccctgtctccttcgtgcttggtgcggtccaaccccaagtcccccgttcccatgtccctgagaaacccatatccattcatgccttttgaggagcccccattcctgcccctctgagatcccccccctcaaatccaaccccgacagcactgcccacccatttttggatccatatcatgaagatgccagatgtggctctacactctgagacctggggtgtcacctggggtcacagtgccccctgaggtgcccccaggagagct

SEQ ID NO: 88 - DNA, 6000 bp, Homo sapiens
ttagccattcagtaccactcttggagtataggctggaggggaagaatttttttattttttgagacagagtttcactcttgctgcccaggctggaatgcaatggtgcgatttccgctcaccgcaacctctgcctcccgggttcaagtgattctcctgcctcagactcccgagtatctgggattgcgggcatgcgccgccatgccaggctaattttgtatttttagtagagacgggggttttaccatgttggtcaggctggtcttgaacccctgacctcaggtggtctgcccacctcagcctcccaaaatgctgggattataggcgtgagccaccttgcccagccagaatttttttttttttttgagacagggtcttgctctgttgcccaggctggagtgctgtggcatgattacagctcactgcagtgtcaacctcctgagctcaagccatccttccacctcacaccctcgagtagctgggactataggcacacaccaccacacctggctagatttttagtttttttttttttttttttgagatggtatctcactctatcacccaggctggagtgcagtggtgcaatcatggctcactgcaacctcctcctcccaggtgcaagcaattctctagcctcagcctctcgagtagctgggattacaaggtatgtgcaccatgcctggctaatttttgtatttttagtagagatgggttttcaccatgttggccagactggtcttgaactcctgacctcaagagatctgcctgcctaggcctcccaaagtgctgggattacaggcatgagccaccacgttcagcctaatttttaaattttttgtagagacggggtctcactatattgcctaagcttgtctcagactcctggcctcaagggatcctccctgtcggcttcccaaagtgctgagattacaggcatgagccaccatgcccaacctggagacagggtttcactgtgttatccaggatggtcttgatctcctgacctcgtgatcggcccgcctcggtctcccaaagtgctgggattacaggcgtgagccactgtgcccagccttcaaccagctttttagtgccttgcttgtagagaaccacttctgaggtaatatttatttatttgtttgttttttgagacagggtctcattctgtcacccaggctggagtgcagtggcgtgatcatagctcactgcaccctccatgaggtaacatttaaactgagacctagagcctgttgcctgtgatagtctcctgactggtctcctcatttctattcatctgctgtaatccattctctactggtaaagtgatcttttcaaagcttacactatgctaatgaagagcacaggctgggttagactctcagctccaccccttattatctcagtttcgttgagaaagttatttaacctgccagggccgaggtttctaaatcagtaggagggggataatgacacctccaaaggtcatcgtaaggctcaaataagaaaagtacactagggccgggcgcggtggctcacgcctgtaatcccagcactttgggaggctgaggtgggcggatcacaaggtcaggagatcgagaccatcctggctaacacggtgtaaccccgtctctaccaaaaacacaaaaaattagccgggcgtagtggcgggcgcctgtagtcccagctacttgggaggctgagccaggagaatggcgtgaacccgggaggcggagcttgcagtgagccgagatggcgccactgcactccagcctgggcgacagagtgagactctgtctaaaaaaaaaaaaaaaagaaaagtacactaaatgtaccaaataaaaacccacctgatgttagctagtagttatattagcagtagtaacttggatcttgtcacaaccctacctccctatctgacctagtttcacaccaccctgctcattaggcattagtgacttgccctttacctacacaataatcctgtggctcttgatgggatgacctgagggaggagggccttagggccttcacacgtgctgttccctcctgaaatgttctccctgcccttccctcctgggcttggctaatttctcatctttttgctttagctcaaatatcacttacttcacctccctaatcaaaattaaagtctacagagtccacaggtgtactcccttcatagcaccagcagtactatttagttacttcataccaggtggaattgttcacagagtcttcattcaaattacactgacatctgtttttatgggtcagtgcttaagctgtgtgcactgcgaaacattttgaatatcatccttgcgtggaatctgttattttcctttaaagctattatcatgatcagttttcatatataggctgggcatggtggttcaagcctgtaatcccagcactttgggaggctggggtgggtagatcacttgaggtcaggagttcgagaccagcctggccaacatggtgaaaccctgtctctactaaaaaaaaatacagtccgagcacagtggcttgcacctgttatcccagcactgtgggaggccgaggcaggtggatcacctgaggtcaggagtttgagaccagcctgaccaacatggttaaagcctgtctctactaaaaaatacaaaaattagccgagcgtggtggcacgcacctgtaggcccagctactcgggaagctgaggcaggagaattgcttgaacctgggaggtggaggttgcagtgagccgaaatcgcaccactgtactccaacctgggcgacagagcaagactccatctcaaaaaaaaaaaaaaaaaattatccgggcgtggtggcgggtgcctgtaatcccagctactcgggaggctgagaaaggagaatcgcttgaatacaagatggtggaggttgcagtgagccgagagcataccactccagcctccagcctgggtaacagagtaagactgtctcaaaaaaaaccaaaaattcatatatatagacagacatataaatacatatatggatattagagagagagaggcagacagggagagggagagagagaaagtgtgagagagcttttttctctgtatctttcatgattataggaatatgctgtgctcatcaagatatacccaattgtggctgtgcaccgtggctcacacctgtaatccttgcactttggggggccaaggagggcggatcacctgaggtcaggagttccagaccagcctagccaacatgatggaatcccatctccagaaaaacaaaaatacaaaaattagccgggcatgatggcgggtgcctgtaatcgcagctacttgggaggctgaggtgggagaatagcttgaacacaggaagcagaggttgcagtgagccgagatcacgccaatgcactccagcttgggtgtctcttattaactgtttatttattatttattttgagatggagtctggctctgtcgcccaggctggagggcagtggcgtgatctcggctcactgcaagctgctgctcctgggttcacacggttctccggcctcagcctctcaagtagctgggactacaggcgcctgccaccacacccagctattttttttttttgtatttttagtagagacggggttttaccgtgttagccaggatggtctcgatgtcctgacctcgtgatccacccgcctctgcctcccaaagtgctgggattacaggcgtgagccaccttgcccagcctttcttattaactcttttttttttgagatgcagtctcgctctgtcgcccaggctagagtgcagtggtgcgatctcggctcactgcaagctccatctaccgggttcacgccattctcctgcctcagcctcctgagtagctgggactacaggcgcccgccaccacgcccggctaattcttattaactttttttttagacgggatctcgcactgtcgcctgggctggagtgcaatggcgcgatctcggctcactgcaacttccgcctcccgggttcaagcgattctcctgcctcagcctcccaagtagctggaattacaggcgcgccaccacgcccggctaattttttgtatttttagggttttcaccattgttggtcaggctgctggtctcgaactcctgaccttctgatctgcccacctcagcctcccaaagtgctgggattacaggcgtgagccaccacgcccggccctccagggtcttaatacaaaaccgggtggctggtggcgatggtacagtaagaaaagctccagaggggaaaagcgaatatgtgaattatctaatctcagccactgatccaactccatagtctgtgacttttggagtcctccaatacttccaagctgcatgttcacatttaaagtttctgggggaaaacgaacagggtagagttttaggaaataccagatgttgctgcgattttctacagtgaaggggcgtggaaggggacaatgggagtagaagcgggtttctgaagttgtgtttgtacttgattttaagcgagctgtgaacaactcgtgtccaaataagtggctgagaggtggtcctaagtaagcacaagtttagtagtagagtactcgtaacacagaactggctgaaaccccgccctcttgtctacgggcgttctttcagggcgactttgtcagtaccccaaactgtccccgcatgaggtcactctgcacggtcacgtgctcgagcccgcgggagcgccacatcgccagccgcacccctccacccccaacctgcccacgtgacccggcctagtttctccaggcccgtccctacgtctcactcgggaagccccgccccacgctgagcgctccgcctgcgaccctccgccacttacccaccccggctcaagcacgacccgtggatccacgtgctttttcttgtccaatgggagccggctcccgggcgcgaaggggcggggaggaaaggaacgactgtgctacgttgccagaaggggcgggacctgcaacgtccgacagaacgaggggacgtaacggaggcaggttggagccgctgccgtcgccatgacccgtgagcaccgagcccccttctccttgcccttttctttccgttcaccctaaacaccaccggcgaggcgccggctttgaccttccgtagcttccctagcaaggcgtttctctgggcgcgctctgtggccaccctcacactcggtgcccggaaatcgagccctttgcccacggctacttcacgggaccaccctcccgggttaggcataggccctcccggatcttccgcggtgtaaggagaaggccagcgcccctgtgataggcccagagcccccactccacaagccagcccatcccccacggagacccaaaccgtccacacacaccttgccagctgtttgggccccacgccgccccaaaacacgcctccagctggccccttgggacctcccttctctagtccgtattttgacctggcccgtggcagattcgccactcccccctaccccaagcagcctgggcctcgatgggccgttgtcggggcccggagattgaagtggtgttggatcctgctgctggccgcgctggggtagaagggtcgccggtgtgtgggcagagcggcccccgcgtctcacctttaattttctttccttaggcggtaaccagcgtgagctcgcccgccagaagaatatgaaaaagcagagcgactcggttaagggaaagcgccgagatgacgggctttctgctgccgcccgcaagcagaggtagccccagggaggggagggaaagggacggtggagacctgggttagaccaagggttatagaaggaaagagagctacctcagggcttgaatgtggactagtcgtgaggagcagagtgcattgcttcctctagggttttatttcctccccaccctccaaattgttagctcacagccttacaggaaaggacgggggcgggcgcctgccctcagtctgatttctgagcgtccctgggtctgaccttaagggcaagggcagggagcttcacattt

SEQ ID NO: 89 - DNA, 6000 bp, Homo sapiens; identical to SEQ ID NO: 88

SEQ ID NO: 90 - DNA, 6000 bp, Homo sapiens; identical to SEQ ID NO: 88

SEQ ID NO: 91 - DNA, 6000 bp, Homo sapiens
ggctcactgcaagctccatctaccgggttcacgccattctcctgcctcagcctcctgagtagctgggactacaggcgcccgccaccacgcccggctaattcttattaactttttttttagacgggatctcgcactgtcgcctgggctggagtgcaatggcgcgatctcggctcactgcaacttccgcctcccgggttcaagcgattctcctgcctcagcctcccaagtagctggaattacaggcgcgccaccacgcccggctaattttttgtatttttagggttttcaccattgttggtcaggctgctggtctcgaactcctgaccttctgatctgcccacctcagcctcccaaagtgctgggattacaggcgtgagccaccacgcccggccctccagggtcttaatacaaaaccgggtggctggtggcgatggtacagtaagaaaagctccagaggggaaaagcgaatatgtgaattatctaatctcagccactgatccaactccatagtctgtgacttttggagtcctccaatacttccaagctgcatgttcacatttaaagtttctgggggaaaacgaacagggtagagttttaggaaataccagatgttgctgcgattttctacagtgaaggggcgtggaaggggacaatgggagtagaagcgggtttctgaagttgtgtttgtacttgattttaagcgagctgtgaacaactcgtgtccaaataagtggctgagaggtggtcctaagtaagcacaagtttagtagtagagtactcgtaacacagaactggctgaaaccccgccctcttgtctacgggcgttctttcagggcgactttgtcagtaccccaaactgtccccgcatgaggtcactctgcacggtcacgtgctcgagcccgcgggagcgccacatcgccagccgcacccctccacccccaacctgcccacgtgacccggcctagtttctccaggcccgtccctacgtctcactcgggaagccccgccccacgctgagcgctccgcctgcgaccctccgccacttacccaccccggctcaagcacgacccgtggatccacgtgctttttcttgtccaatgggagccggctcccgggcgcgaaggggcggggaggaaaggaacgactgtgctacgttgccagaaggggcgggacctgcaacgtccgacagaacgaggggacgtaacggaggcaggttggagccgctgccgtcgccatgacccgtgagcaccgagcccccttctccttgcccttttctttccgttcaccctaaacaccaccggcgaggcgccggctttgaccttccgtagcttccctagcaaggcgtttctctgggcgcgctctgtggccaccctcacactcggtgcccggaaatcgagccctttgcccacggctacttcacgggaccaccctcccgggttaggcataggccctcccggatcttccgcggtgtaaggagaaggccagcgcccctgtgataggcccagagcccccactccacaagccagcccatcccccacggagacccaaaccgtccacacacaccttgccagctgtttgggccccacgccgccccaaaacacgcctccagctggccccttgggacctcccttctctagtccgtattttgacctggcccgtggcagattcgccactcccccctaccccaagcagcctgggcctcgatgggccgttgtcggggcccggagattgaagtggtgttggatcctgctgctggccgcgctggggtagaagggtcgccggtgtgtgggcagagcggcccccgcgtctcacctttaattttctttccttaggcggtaaccagcgtgagctcgcccgccagaagaatatgaaaaagcagagcgactcggttaagggaaagcgccgagatgacgggctttctgctgccgcccgcaagcagaggtagccccagggaggggagggaaagggacggtggagacctgggttagaccaagggttatagaaggaaagagagctacctcagggcttgaatgtggactagtcgtgaggagcagagtgcattgcttcctctagggttttatttcctccccaccctccaaattgttagctcacagccttacaggaaaggacgggggcgggcgcctgccctcagtctgatttctgagcgtccctgggtctgaccttaagggcaagggcagggagcttcacatttcaaatacagttgtggttacggcagcccagtacttttggccctccttgctgttcggttctcctcccttctcccaacctcctcactggtgttgctgggtgtggtcctcaatacagaatagagacccttgggcctgtgtcaccagacttctgaccccttgggcaacagccagatggagactggtcgccttttgagcctcagctctcttcctcttgttctcctagggtgggagtacagcagccaaacgctgaacttagtcccatccacttccatcttatcctttgtgcccttcatccccctgcatcttgtcctttttgccctctggtacctcccagtgccccatcatctctacccccagggactcggagatcatgcagcagaagcagaaaaaggcaaacgagaagaaggaggaacccaagtagctttgtggcttcgtgtccaaccctcttgcccttcgcctgtgtgcctggagccagtcccaccacgctcgcgtttcctcctgtagtgctcacaggtcccagcaccgatggcattccctttgccctgagtctgcagcgggtcccttttgtgcttccttcccctcaggtagcctctctccccctgggccactcccgggggtgagggggttaccccttcccagtgttttttattcctgtggggctcaccccaaagtattaaaagtagctttgtaattccttgagcgcctggtttgactggggacttggggggatggggttggaagaatgactgccctttcccaccaaaaaagggagaactctttagattcagattgtgggtatgtagacttaataagtgaaacatcacagaagaagcctttattatacaatgacaaccaaacaagtactccggatatgcagtagaggaatcctctaagaaccatagagacttcttttctgtgatttttgttccccacccttgaacaccatctctaggatggagttggcctaagagtgaatgctgcaagatctgtgtttatgcctcttttcctcattcttcctcagtttgttcgtctgcttgaaagttggccaaaaaatcctgctgctcaccgacttcccgtggtcagctgctgtcaagcgttcactttctcttctgtcattcctcatggaatgagggtggttttgtcttcccgcttcccttgacctcaaaatcaggattaaaacctggggtagcctctgtgctcctttcttctatgccctggtttgttctgtggttctgggcttcttatatccgtgtgcccagggctgaactccttattttcctttctccaagggcagagccgagtcttcagtccctgttggtctttccccacccccacttccagcccaagagccaggaaagggctggtgccacactgtctgctgggatcagcggtggttctttgagctgctgatttgggtgttaggctcttgagctgggatgcagatgtaacagtagctccagtgagtcagacactctgcccagcacattagactgtgtttgaccacttcttccagttcatagtattgacttcagcccaaacggagataactccctgtgtgtccttgaggtattgagctgggctggacagctccccttgagccaactctaggagtacaatgtcaggggaaccccagtttgtgaaaaggacttagactggaggatatttgttatctggggatatgatgcggtggcggcggcgcctcaagataaggggctggggtttctgggtggggggccaacagagtggtgccagtaacagccccagatagaggagtacgcaggcccagcatgaggcaaccttgacccagaaggtggcccagctacccttgatgaaggtcttttccagttctgctccctcatagctgtgtaaccaaaggctctggttagagaatatgaagggccttagcttttagacctgttctacctcctcaccaaatataatggcagacccatgtgtgtctggaatggccttgaattgctctttccttaaaatagctagctcttcaggagagtatctaaggcccactccatcttacctgaaccagttggtaagggtaaccatgacatagagtgaggcaaggaagaagacgaagtggaaggcagaatagttgtaggaaagatgctggacttggactggaggagctggaggggtttcttggtcagctggcctcgcagccccacccctttgccctggagagaggaaatggctgctgggagcagagctgctgaaacacctcttcccctctcccccaactacctttgttaaggctcttgagggttcttatggcactccacagagatctaccacttcttatggttcctcacttggcactcacctttgtctgcctccactgtttcagggcagcagaaacacagtgagggcttctgcaaaacagaacgcaggttttggaatggtcttaaaagatgtgagggtgttaatctaggaaacttcccccgtgaaaagattggtctagtattaaaaagtggaggcacacctgggttcaaattctagctccagcatataagtggctgtgcagactttggtaagatgtttaatcttttgtgcctcgatttctccatttgtaaaatggagcaaatacctacctcacagggttgttgtgagggttaaattaaatgagattatgtaaaagtatctagcacagttgcctagcacattgtgggtactcaataaaaggtaacagcagctataatctgagcattctgggtagaggttggtaggatgtgtgtgtgtctttgtgtgggggagggagggtgttggggatatggagctctttatcctcacctgaaactcatagctgtaaaccttgacaatccacaggggtccaaatacctcagccaggtaggaggcctcattgctgagaaagaatagagttcttaagctggtttagttaaatagggattatctgggggcatttactaccaattggtccatactggtaatcctcaaaagggtaccatactccctgtgcccttttccaccaaagatttagaattctattcatgtgagagccctaaggtctttggacatattttaaattctcaagtcattccccccacccccttcatctcatacagatcatctgacaaagtactattcttagaatttgtccctgtttgtggggagcttttctcactctagtcttgctctaaactttaaataatggtcccagacattgtcctgaccatccttccctgtcttgggcaccctcctttcatacctccacccttgacacctttacgcaccaagcaaaaagcacacaagcatacatgatgctagcactcagcattgctagagagatatctggtgtttggggttccattttactcaggccaggcaggcacagggtgtgattctgtccttgaaggattactgggaagggacaacagaagagatgggtattaacaatgagctaggtatttggcaggggcaaaaaaaggtcttagcatggagaatccaggtcctgtcccttacctctctctggaggacggctggacagtgcagagaaagtcagatacatgatatagcagctgatgacagaagcttgtaggaggccagagcggggttgctctggggagtaagtataattgctttagtctacaggctggtaatttcctccatttctacccccacttgtacttctgtctccccatcctttggtggggatagggaagcagagattcttttatcaaataattgagattagggaggtaatgaaacttgctatgcttttaaggcccccaaaacctggaatgctgtaggacatgtaccc

SEQ ID NO: 92 - DNA, 6000 bp, Homo sapiens
ggtttaaatctatttttgactaggtgtggcagttcatgcctgtaagcccagtgctttgggagtccaagatgagaagattgcttgaggccaagagttcaagaccagcctaggcaacatgtgacaccccatctctaccaaaagtttttaaaaattagccaggtgtagtggcatgtgcctgtcgtcccagctacttgagaggcagaggcacgagaatcacttgagttcaggagtgtgaggttgtaatgagctatgattgtgccacagcactccaacctgggcaacagagtgagaccctgcctcaaaaaaaaaattattaaatggaatgacttcaaactgatgacttaaccaaatattcaacttgagagtcatgctttctaatgccaatttttaatttttccaaagcttttatagtgcattctattaattttttaattttctgaatgttggttgatcttaactgcagtgcaactgaaagtaatgaaaattatttaagaatatcaatcattaaagtaaggtattacaagaaattaatattagctgatcttgttgctaggccagaataaaaagaatgagaaaaatgcatttataatgtaggatatgtgtgccatgcagcattagcggttggtaaagtacatgtccacccatctcaacctaagtacttggctaattttaataatttcagtttcaagttatttagctataatttccaactgtttcctttttttgggttggtggtaaacagaataaattttatccataatattgttattttttcttgagacggagtctcactctgtctcaggctggggtgcagtggcacaatctcagtccactgcaacttccgcctcctgggttcaagtgattctcctgcctcagcctcccgagtagctgtgactactggcgtgcaccaccacgcccagtgaatttttgtatttttagtagagacaggctttcaccatgttagccaagccagttctgaattcctgacctcaagttatccgcctgcctcggccttctaaagtgctggaattacaggcatgagccaccgtgcccagactatccagaatatttttaaatgattgacttgttttatttcagatactgaattataattggtaacagaaccaaatgatgacattaggaaatttttctgacaaatctgtggccactccagtcttctttcccattattgtgaaagcaccattaaaacaaaatgcagcttactttcaactattcattattaaatttcaaatattcattactgaagccacatttaaagtagacaatatcggctgggcgcggcggttcacgcctgtaatcccagcactttgggaggccaaggctggtcgatcactagaggtcaagagtttgagaccggcctggccaacatggtgaaaccctgtctctactaaaaatacaaaaattagctgggcttggtggtgcacgcctgtaatcccagctacttggttgagacaggagaatcacttgaacccagggggcagaggttgcagtgagccaagatcgtgccagtgcactccagcctgagggacagagcacaactctgcctcaaaagaaaaaaagtaaaatagacaataatgtagtagaaatataatctgtgtggcagacaccaattacttttttttttttttttggagatggagtctcgctctgttgcccaggctggagtgcaatggtgtgatctctgctcactgcaacctgtgtctctggagttcaagcgattctcctgcctcagcctcctgagtagctgggactacaggcgcacactactacacctggctaatttttgtatttttagtagagatgggatttcaccatgttgtccaggctggtctcgaacttctgacctcgtgatccgcccacttgtgatctgcccacctcagcctcccaaagtgctgggattataggcgtgagccaccgtgcccagctgacaccaattcttttaaagcaacaaatatctttaccagtacagaagcttattcaactgtgtactggagataaatctctaggtaattttcttccaatatgtagatgtctcatcaattatagtgcatatttgccattctcttccaagattcttaaatatgttgacataatttcttttgcagtatgttctgctattcttgttgcaccgtatcatgtatgtaaacatttgcctgtatctactccatttttccctttcaactctattgttcccttcactatcagataaaggcctatgagttttttgtttgagacagggtcttgttctgtcgcccaggctggagtgcagtggtgtgatctcggctcattacaatctccaactcctgggctcaaggcatcctcccacttcacactcccaggtaactgggattacaggcacacaccaccacacccagcttttttgtctgtttattttatttgtttgtaaagacagggttttgccatgttggccaggctagtctctaactcctggcctcaagtgatccctgcctgggcctcccaaagtgctgggattacaggtgtgagccactgcacctggcccatgcccattctttaagtattgtctatggctactttggcacatttggcactacagtgagagctgagtagctgtgacagagactataagtcccacaaagcctaaaatatttactatttggctgtttacacaaaaggtttgctaacatatggtctagaaaaatcaacaaaacaataaatcacgccctgacttgctgcatttgcccatttccatggtgtaaatactccccttacagccaatttcgtgctaccaatgtgacatttctgaatagagttgggaagagatgcatacaacatatgtagtatttccacagggaatacaatggacaaataacctcaagagcagaattattagtaaaatgaagaaaaaaactacaaagtgatgagtttttaatatttattatatttaaaaatttttttttagaaatagggtctcactctgttgcccaggctggagtgcagtggtgtgatcatagctcactgcaacatcaaacttctagcctcaagccatcttcccgccttagcctcccaaagcactgggattacaaatgtgactcaacatgcctggcctattacttttatttttaagataatttaattgtagcttatataatttgatttctaataatggttgtgcttatgacctggctcataaaatccctgaaaatttagcaatcaacctaatgctagctctatcttcaaaaggaggctttgggaaagcaagtaatttttgtatccactaaagcacagagctaaaaaaaattggggggaggggagacatctattgagggaacgccacatgcagggtaacgtattttctggagtactatcctgtattgatattgtatgctctttagcattcccatgctgtctgccacttttgctggagtcttgatacttgatactgttaatgcaaaataagtagcaggccattagtttggagttgtttttgtacccagaaagcaacccaaaatttagaggtattccttgcaccttttgtttgttttgtttttttgagatggagtctcgttctctcatccaggctggagtgcagtggcgagatctctgctcactgcaatctccacttcccgggttcaagtcattctcgtgcctcagcctcccgagtagctgggattacaggcacttaccaccacgtccggctaatttttgtatttttagtggagacggtgcttcgccatgttggctaggctggtctcgaactcctaacctcaggggatccgcctgcctcagcctcccaaagtgctgggattacaggtgtgagccaccgcgcccggccccttgtacctgattttgaatggagtttcaaccaatcacaaacagacaaccagccaagtggttatataattagggacctcccatgtgaccatacccaaataaggcaaacgcttagctgtagccaatcaaatttctttactttcgtgttcagcctataaagtttgatgcctgggcagctagagcaggggtgtctgagcctcttttggttctgactgttgtccgattcaaaatctaagtttgttttgtctgaaatttttatttctacaatacctatccagaaatcagtctaggctggatatttgaaggaagaagggaataactggctggcatattcatcacctgttggaaatctctcttctcacacattttcattaacttcttgaggaagtgtaattacaagcgttttcccacgagcagcccctactaataacgcatcaagctgcatgaattccgaaaagcttcagaaaacttgtggtctgaaaccctactatgcttgaggtacaggaaagaaggatactatcaaaaggcatcatgcagctggcacggaactgggacaagaatttgggggcaggatggccaagtgctaggccaattgacggtctccaaaccattagcacagctcctattctgaatggaggagtaaaaacagctgttggagaacttggacgtcatctgcccttgtcaaaccgttttcaggattaatgtacttaattcagctttttccactacaccacacagcctcctgtaaaacaccctccctgcacacaacttacccccaaagcaccaggaacctagctggctagagttgagcttaggaaaaacctgagtggctccagagtcaaactgcgataacgttgagtcagaggagttaaggacaaagtagagctgcacagaggcccacgtcgtgcaagtgcgtgtctccttcagagaaaagcgtgccgaggtagactaggccccgggcagcaaaaaccctgtcccgtcgccagcgccccgcaccgccagagcgactggagcagacgcgagcgctgggcacgtagccggtggcgcgcacgctcagcccgaggccgcacgggaggctgtctggcgtgcgcgcccccgcggcggtgggcggggtccggggcggggccgcaggagcagtaggtgttagcagcttggtcgcgacaggtgcgctaggtagagcgccgggacctgtgacagggctggtagcagcgcagaggaaaggcggcttttagccaggtaagggccttctctctccacaaccggagagtgcgggaagaccccggcttctctccacaccctctttctccttcgacttttggggcggggggagtgcaaggagtgtgagtccctccccctcgagataaggggtcgagggacgctgatcctccgttctttcctcacttctggggcctgcgctgggtggggagtgcttatgtcgggctgagcctttgctgcccaagggcgggagctgcaaataccccgtcctctcccaccgagaacactgcattctaactgtatactttctggtgtggtggaggaaggtgacaattcattaaaactccaaataccctccttccagggaaatactgtaatattcaactgttctttttccttcattttcagccattccctctcttttcgattttttctcccttccattacgccagctgaactctgtttaagacacttacacccttttgaggaatgttgagaatatagcagtccttgcagccgatgtgtcatccccgaatcgctatcgtgtatatatcgctggcacttgcccccgacatatgttggtgttaatgtaaggtaattgtacacccctggctacacatactaaagcttgaagttgtagctgctaggaacgaaccatctggcacccttcctagcctccttactgatgcttgcaagaacggtttagctgatcctggtgagagatatttgaactactattgtcttgcacctaattccagctttcaaaagtctgccttggacgggcgcagtggctcacgcctataatcccaacactttgggaaactgaggcgggaggatcgcttgagcccaggtgtttgagaccagccaaggcaacttagcgagacccttgtctctacaaaaaaataaataaataaataaaaataaaagataagtctgcctaatccagatctg

SEQ ID NO: 93 - DNA, 6000 bp, Homo sapiens
gtctagagaaaaccctgtacccattagtagtcactcttcatttctcaccaacccaaattatattttaacaaacttattctgggaatgctttagcatccctcttgtttatttatgagacacggtcttgcactgttgcccaggctggagtgcagtggcactattacagctcattgcagcctcaatctcctgggctcaagcgatcttcccacctcagcctcctaagtagctaaggctacaggtgtgtgtcactatacctgtctattttttttttaattgtagagatgggaaggtgggttctcgaactgctaggctcaagtaatcctccaccttagcctgtcaaagagttgggattacatgtgtaagccactgtgccaggtgtgcaccctttactgaccagctgtccaggaagccaactcacaggttctctgctgaaccagctcttcctcaccctactcaatcagaattccacatctccatagcataagcaaactccctctggttaaggtcaacaaagacctcaatgtcaccaaacccaatggacattttctagtctctatttcacttgctgtctcaggaacatttgatataaatggcatctcatctttctcaaaaagaggcttttcgttggcttccttgtcaccacattctcctggttttcttctctctctggacctgtatttgtagcctcatttgcgatgttttcctactttacctaaactataatgggttttcccttggacatcttctcactctctaatatttccagacaatctcggttgattttccgtggaatcctttactattacatgctggctattctcaaatttgtatctccagtccatgcctctttttctgagttccagactagtatcatcagctgctcacttttcatttatacatctcacacctcaaactcatcaagtttgaaactcatcatttgccccccaaaagctgctgctgtctcagcactccctgtcttggtaaagggcaccaccatccaccaaagagctcaaaccaaaaaaaatatagaagtcatctttggcttcatcctcatatcccaactgatctgcaaatcctgcaataaacatcctcatgcaaaattaaaaaaagaaaaacctttcaattcctgagacatatgttcgtttagaaggtaacatggtgattctttttctttttcttttttattttcttttgagacagagtctcgctctgttgcctaggctggagtgcagtgaaaggatcttagctcattgcaaactccccctcccagggtccagcgattttcatgcctcagcctcctgagtagctgggattacaggcatgtgctaccatgcctggctaattttttgtatttttagtatagacggggtttcactatgttggccaggttggtcttgaactcctggcctgacgtgatctgcctgccttggcctcccaaagtgctaggattatagccatgagccactgtgcccggaccatggagattcttagataaacagccatgggcacaaagtaggaattcaatacaaatttgtgggttgagcaaatgactttagatatgttcagattcgagttactgtaagaggaaataagtactatagatctacatgttttcctaaatcagtatgttttatcaaatcaaagaaatacctgtaaaacttgatttatgctgccttggagaaaacaatggacaagaacacacttatctatcatccatttctctcccttgaaacactcagtgccattatttttgaaaggtgatgaattgcaaattttgtcacttttcatacatggtaagaacaaaaggtgcagttaaaaaacaaaaaaaaaatcatctttctgtgaaaaggatgttactatttcttaaaacatagaaattaagatgagtaatttgctttctcatatgttgataatgaatagattgaaaaaacttcgtatcatccattatcaattatattatttaatatatgtacttggggatatttaaatggtataataaaatgacctaattacttatttcacaatatttaaactgaggcacaatagtaaccactaattcaaaactacccattcaacagccttccacacagaggcttatgagggaactacagggtttatatcagccaacagtgcaggcagaactgcaagctttgtttggagctttttgactttatccatgtacacaggccaaaaagcccacaatatcaattgagatctgtagaaaattgtatttagacttatcccataatgtccaaatatttggatcatgaagtagggagtaggtgggatattcacgcaaacttacttatagatggctatacatttgaatctagtcattcagtgttaccaatggataggacacccatgcttctgaattagctctgtgattgtctataaaaactgctgatttgaattttgactgcatcctagcaaaccaatccatttgctattgccttctgggcaaaatgcctgggctttgtaaatttgaaaatgagctccttattgaaggggaaaaataaaccccaggacaataactttcgattggtggtctcctctgggttctaacctttaaaagtagctctaaaagagtccattttccacaacaatgatgttgagcccttggttaattttaggagcattttcatttgggggaaacttctgtattgtgacaacatctttttttggttttatattttaaaaatttggggggaccgggcacagtggctcatgtctgtaaatcccagcactttgcgaggccgagaagggtggatcgcaaggtcaagagttcgagaacagcctgactaacatgttgagaccctgtctctgctaaaaatacaaaaattagccagggttggtggcacacacctgtaatcccagctactcgggaggctgaggcaggagaattgcttgaacccaggaggtggaggttgcagtgagctgagattaagccactgcactccagcccaggcgacagagcaagactccatctcaaaaaaatttttttaaatttaatttttgtaggtacatagtaggtatatttatggggtacacacaatattttgatataggcacataatgcataataatcacatcagagtaaatgggatatctaccatctcaaacatttatcctttctttatgttacaaaccaattatattcttagttattttaaaatgcacaattactgttgcctgtagttgccctgttttgctatcaaatactataccttattcattctatctaactatatatatattttttacccattacccatcccccctacccttcccagcctctggtaaccatcattctactgtctccatgagttcaattgttttaaatgttagctcccatgaataagtgagaacatgtgaaatttgtctttctgtgcctggcttatttcacttaacataatgacctctagttccatctatgttgttgcaaatgccaggatctcattctttgttatggctgaatagtactccatgggtatatgtaacgatttatccattcatctgttgatggacacttaggttgcttccaaaccttggctattgtgagtagtgctgcaataaacataggagtgcaggtatctctttgatacactgatttccttttttgggcatatatacctagcagtgagattgctaggtcatacggtatctctatttttagttttatgaggaacttccatactgttctccatagtggttatactttttacattcccacaaacacaagggttcctttttttttccacaacctcgccagtatttattgcctgagcaccttttcatatacctgtttgctatttgtatgtcttcttttgagaaatgtctattcaaatcttttgcccatttattactcggactattagatttttttttcctatagagttgttggagctcctcatatattctggttattaatcccttgtcagatggatagttcccattctgtgggttgtctcttcagtttgtttcctttgctgtgcagaagctttttagcttaatatgatcccatttgtccattttctttggttgcctgtactgtgacgacatcttgaagttgcgagtttggggattgcctgccttgtatattcttttctgttaccatcatctttaatagccacaaatgactgttgacccacatgatatctgcactagaaacccaaagattcccgtcattatttttgttgattatatggaagcacccataaaccagcgcaaatcctaaacataattatcttgtccagaaggagacattaatgtaaaacttatgtcaagaaagatttagccacattccctcggattggtcattcctagttagagtccttgaggctgccatcgtttactttgaaaactgcccagcaggtgtatgaatagcaactccaggacaatgtagaaccattaccattttaaagacagcaatcccccttttaaaaaactactgaggccttcgaagaaaccacacggctgccttgggccccaaaagctgcggaaaagcgcagtattcagttaagcaaataactacttacactgtttattttggttacgattccttaagtgagaagtaaatcaattaacaggacaaatgacacgatggttaggcacgaaagggacagtgctgccacctcattagcttggagcaaccttccagctcataccatgcggactgatgactaaccttgccaggcaacgctgtgaggtttggaaacccacctctttgacctaggcccggtcaacaccgataaaccctctgaatcaacgctggcgctcccaagcccactcacacgccgtcaggaagcagtttccgaaacaggccgggtgcgggggtgggggatcccgttccagccccacccctgaaagttgctgggagtggcacccaaagaactttcccagattgatctctgttgccgctcagggaggtcagctccaggccctcagcctttcggccgggagccaaactgccctgcctgccaagcccctccttctctgcaccttaaacagccgcgaggggagagtcggctgggattttcttcttaagaagtcgcgcaggtttttcgagctccactctgcgccaggagagccacggcagcaggaacgggcactgctgccaccgggccgacgggtgagtcactgtttggaaatggagtgggcgggcgagggtgtgagagaatgaatgatgtcaagagcgcgctgggcgcagggcgcagggagcgggccgcgcgcggcgggcggggagagcgggcgcggggccgcggtcaacactgagcgccgcgccgtgggccgagtggggcggggagacccagccctcggcgcgcacggagcctggccggtgctgcagcgccgccgagtgcggcctcgggggcggcggccgcgggagggacccggagagctgcttcccctagtcaggccgcggcgtgggagggcgagaccccgagcaaactttctagcggcttcggcccgagggtggtgacgcccggggctggtcgcggcggctgcggcagcgggctccatcccctggcaaatccccttcccgggagcaagtgccttcagctgggagtgtctggagccctggccaccagcgggtaaggagcgcgcggaggggccaggaggaggatgggctggggagcggagagtcctccgaagcgcgggaggggaaaggtggattgcgaagcggggacgtggctctaatccggcccccaccctccccgcccagggcatgcttcctcgattttgtggtctggaggagagatgtgtgccttagtctccttcctctgagcagtcatctcattcatttgcaacccatttcgggtaccccggtcctggcgttggaagggcacaggttaaaccccagattgtccagaaccactccggaggtcagggctgaagttcagttggtggaggagggactgtgtgtgtgtgtttgtgtgtgtggtttttcttttctttctctttttttttttttttttttttgagaggcacttactgatgatg

SEQ ID NO: 94 - DNA, 6000 bp, Homo sapiens
tgtggtggtacgtgcgtgtaatcccaactacttgggagactggggcaggagaatcccttgaatccaggaggtggaggttgcagtgagccaagatcacacgactgcactccagcctggacaacagagcaatactccacctcaaaaaaaaaaaaaaaaagacaaggtcctgggggagaaaaaaggaataaaaacatgaaggccttttaaatacaaacacatgtaaacgtacagacacacatcttggatggtagttttcaattaagctgactttaaccattaagttcctttaaaaaaacaactctttaaatctcatttccatatttcacgaactaggacaaattgccgctatttcagaagtaccaagtatcaaaccagaaagggcttgatttaggaaacaaaactcaggctgtcatggtgggaaaaaaaaggcagaaccctagctattgaaatgcagtgtgaggtgactgcctttgctttcagtttgacctggctagcaaaaaggtggctttgttatgtaaataaagccccttaagtagtcaaaattaaaattctttccttttttttctttttttttcctttttctggctgtttttctcccccccattataccaccttaccatactaccttttttgtgtgtgtctatgagaatttagccacttcagtggccttgttccccataatttggaactttccttcggatttgatcaagtcggaagaagttggtcaaacccaatgggaaaaagactgaaacaacaagaaaaagagaaacaataaaaaaaaacagttaagcaaaaaaaaaatgattgcacaacttatatgattactgagcactctaatggtaaagacattaagaccagctggttgttgattttaactttagccaagacaaaccccaatttagttatctaggggttgttgggtctcaggctgaagactgctttctatcctagtgaagcagccttgttgtctggggtgatacctgaggttcattgtctcatgcagaggaaatcaaggacatggacacacaaggagtgaggttaaaagcagaggattaataggcaaaaggaaaagaagaactttctcctgcagagagaggggtcccaaatgggtttctgcttcctcagtgaaatgcaggttttatagatgagcttgaggaggtggtgtttgatttacatagggcatgaaagattggttggaccaggtgtgccatttgcataagggtgcaaaaagctggccacccccaccctaatgttttattatgcaaatggattatcttcctggcccacaccatgttgcctgtttctttacacatggtgacaaaaaggaagatggagcctacacgttgaacatacctggcccccaggtagccattttgtattggcacagctgctggcagtaacctgtgcaagcttccagcttgcttatctatgtctgcagctcaatttttcaggctgctcttcattagacaaaagaagtttctcgggctgctttctgttagaagggaagccttgccaagaactcttaccctcactatctgcctaaataacttctatctcctgtgtcactaggagcaggaaaaaaaaaaaaaaacctcatcttccctgttggaagggaaactccgtaaaggagttacctaccttccatcatcatggaagcaggaaaaacttgcctgccttgtgttggaagcaactaaaactccaaaaaaaaaaaaaaaaaaaaaaaggttgtacagcaaaataaactttagatctcaaccagaattggggagatcagggattctctggaatgggtgcttccaggcctcagcaaattgtcctattggtttaagccataaagatagcccaaggttgaaccaagcactgataggagatttgttaaaggtcaggggcacctccactcagaatccctctgtggttaccaaaatgtgaaccctgaaaatctgagacaggtctcagttaatttagaaagtttattttgccaaggttgaggttgcacacccatgacacagcctcgggaggtcttgaagacatgtgcccaaggtggtcagagcacagtttggtttcatacattttagggggatatgagacatcaatcaacatatgtaagatgaacattggttcggtccggaaaggtgggacaactcaaagtggggagaggccttccaggtcataggtagataagagataaatggttgcattcttttgggtttctgattagcctctccaaagaaggcaatcagatatgcatttatctccatgagcagatgtgtgactttgaatagaatgggaggcaggtttgccctaagcagttcccagcttgactttttcctttagctgagtgattttgggaccccgagatattttcctttcaaaataggaatgaatatgttgtgatcattatcttgatgacaaacatttcgtcccaagatttgttcacacatgatgaatgtgctatgtatatttaatcttaatgaaatcccaaggaaaatattaattttaacactaataacgataaatgggcattgtactcacatagtgttcttactcccaggggcacaaagctcttcacaattaattatttcagtcattctcatagcagtcccatgaggtgggtggctgagtgtgtcctcttggaaaaaaaaaagaaaaaaggttactaattggattttcttctgttccacattctgtgttctagaaccgagtagctaccttataaagaccatctgtacatccactgtgaaatggagtttcaaaatcacaagcttctttcccacatgaacataagactaggagcacatatggaagagtaaagttgaagggaatttggatgatgatttggcaagatgctgtaagtggattaggcaaggctgctaaagagagacaggaaatggctgtgttagtgcttcggacctccgttagaagtagcagttcatggtgttgaaggtttgttgttgaaaataccttcctgaggcacctcttcattgtgcttattcttcccacaacattgtgccaagacactgtcaagcctgggcctgtcaaagcctgggatgtcaaaggcctgggtctttctcatcctgctgtaatgtattgatagctgggggctctgcagaaggacaagggaaaggtgagatgtttataattctcagtagtaccttttagctagtctcatgctcccttatcccccatttctctaccaggccagctttccacatgcttttgctttctcagaaacagagcctgtgtgtggacacatcttgtccctggagcagggaaacagtacagctaaacctctcactttacctagtgatcagctcatccctctccttcctttcacaatatgccattcagtcttctccagtagtctttcatcattttagtcctgtctctttggttagactgcaagctctttggctgaatgttcaggtcaggtgtttttcactccttttaatttgccctacatagccttcagcactggggcatttaggtgcacagtaaacacttgtggtttatctatttgccacccataattgtaaacagacattgcctgtacatattgactgccattttcgctgtgttttttttctttcattaaataaaggcttagctgtcatcactttgagtttgtcctcctcagttttccctgaagttaccctgaaacggggaggcaggggaggggggaggtcctttaaaatgcagtggattgtgcttaagttgagcagtgtatccagggagaggactaattacgaggtttgaaaacctcatcaggtggctggtttctgtagcaggactaaaagactgctctcctaaattgagaacagctggggctgtgtgctagcaagtataaaagaggtggcagtggtgccccgtgtccgaaagaagtgtgtgctctctggagcctgtggagctgaagccaaaggtagttatcctcatcagtgtcgtggtgggtgagtcccctgagctggtcctctggaggcccgtttctgttgtttggtagaaattgtggtagctgaatcaaaatattgttagttactaatttatcatgccaattgtagtgaggtatttttatccttcaaataaattctacttgttacctgcgtgagagacatagctaaggcttggtgtatcttttcagagttattttgaaggctgccagcttttcttgtatatggtgtgcgtctctgaatataaaaggataaactgaggctgtgccattttaaaaatcttgaatgtgttgttcttgaatctgttcttaaaagcggtcacttaaaaagacttctgttttttaattagaaaatagaaaattgactattttgacaaatgaagagtaacaattattcaatgcatataagcctcttaccagttttttattctttctttatggctcatagaaaatacagtcttaggaaggattgatgtgatctctgggtaatttctagcttattatgacttcatggttagcaacaagtgatagtgtctgatgaagtgtttgcaatgttaggtcctgatttttctttaaggaaatttaaagggaactgattgttaaaatgttcctatttctaccaatactagctcaaaaagagacaagaattccaagataaaactgttcagtattttgtaaataaacttgatctcagcagctttaactaggttctgacgttacatttataaagcaaatggctttggtatttgtttccttagtttaagaatgtttctgttttggatggttgacagttggacaagcatagtttctgaacataattttgttttgcttttaggtgggatagtaacatctttttgagggaagaattggcttcctttcttgaaagtggtgaaggtacagcatatagctgcatggaagaaacagtaatcggatggctaccttctacattttgtattaggaaacaaagtccattgtaagagtccatgttgatcttggaaatagaaggattgaaaaaagctaaatttccacaaagaacaagaacttgaccatctcctttttgatctgaagactaggggacaatggatatcatagagacagcaaaacttgaagaacatttggaaaatcaacccagtgatcctacgaacacttatgcaagacccgctgaacctgttgaagaagaaaacaaaaatggcaatggtaaacccaagagcttatccagtgggctgcgaaaaggcaccaaaaagtacccggactatatccaaattgctatgcccactgaatcaaggaacaaatttccactagagtggtggaaaacgggcattgccttcatatatgcagttttcaacctcgtcttgacaaccgtcatgatcacagttgtacatgagagggtccctcccaaggagcttagccctccactcccagacaagttttttgattacattgatagggtgaaatgggcattttctgtatcagaaataaatgggattatattagttggattatggatcacccagtggctgtttctgagatacaagtaagtaaatctaatgttttgaggatttgtcatgggtttgtttttgagtgaatagatgggttattgagattatttttcctttttttcccccaataaattcagtcttacccaaacatttgatgaaagaaaacagtagaaagctctaccacattgaataaattcagtcactattcagtaagtgtttgatgagcaactgtgtatgaaagtggcagtgtacagcagtactgtggtggatgactcagagttgatgaatttaaggtgcagttcctgacttccagcaacttggtgctatggtatttgtatgataaatcaagaggcttggaaaggaataacattcactcccatcatgtttgttatttcaggctcttgacaagtgggaaaaggaataggttgagaaacttttttctccattactcataatgtgatgtctgtattggtctagagtcaatagcctgctttaaggtttgcctagattcaattctcaaattttacatttctgtggggctgggtgtgtggatgtggtttc

SEQ ID NO: 95 - DNA, 6000 bp, Homo sapiens
gtgatgcacacctgtaatcccagctactctggaggcagaggcaccagaatcacttgaacccaggaggcagaggttgcagtgagccgagattatgccactacactccagcctgcgcgggagactctatcttaaaaacaaaaaacaaaaaatttttaaaaatggtattttctagtagtctacccccaactccaactacctcatttagttacatatcttgtttgtttctttgttaacatgatttaattaaggtccaatcaactttttttggaaatgtttcacatatgtcttttttgaaactttgatctactttactggtttttgtcttttgttttgggattttttgactctcaggtttattgtagagagagaaatcctgcaggtctctttctgcatcagttcaatcagtctttgctatccaatatctgatgtttcaaccaacatatgcacaaattgatataggtcaggtactcctgggtcataggcacccaaaaaaattccaaattattctacaactatttgctcttctttttgggtttagggaaatcttcagtgatagctcttaattcatcttgggttcaaggtttaaattctacagttgcctacatacctagctcatggaagggatgcatccttagaagcaaatggcattttgagttttaagaggactgttggggaagaaggtggtctgcatgagaggaaggcaaggaaggagatgcagaaaaagaaatatcagaaaaataaagacgaagaaggaaaactgaacatagagtgataactggaaaccaaaaaggagtagaatttaccaaggaaataattctactttgttgttgtttaagtcatcagattgctcattcactttaaccaaagaatcttatagtgaagcaattttagaactgagttttatttgtagacttttgcataccaattagaaaattatccattacatctgataaatcattttctctttcttttctaaggtgcttctcagataattgtttaagtccagtgtttcccagcatggccattgaaagcccaaataatctttggtgaaattatgctatttagagaggtgggcactagaattagaattagaataagtatatatatataggaaaaaggagtttttcctgtaggagtggaaaaatctgacttaaatggtcccataagagctggcaaaagttaaaagtaaagcttgtgtactttgtatcttgagcccccaaccttgaggatgagttgcctctaaatgcacacctgacaatgtgtctccccaggcaagtataacaccagagagaatgctctttctggatcaaaaccaaattctcagaacaaaaatctagatgagaggataatcttatctagttttattggtaacccacagcaaagtttgtccaaatgaatgccagtcaaatgaaaactacattggtctgggaggacagctcaaattaaaggcttatagggcctatgcctgtgttctactctatgacaacacttccagattgcacaatgcaaaacagaagcagaaaagagagaaaacagagatgaaaaggaatagcctgactccaccaaagatgccaatcaaatgggaagtgataacaaatcctaggtaccaaagtgagactaaatagccaaagaactcaaaatcaaagagcagagttcagaaccagtgctgacccaatgtgtcaatgcagactcaactgtgtgcagtgaggcacaagaagccttggtgggtactgcacctggcagagaactgggatccatggtgacatgcagtgcagacagtatctctgtggaaacttcaagaaaactacagaaacaagtgaagctcacacaaatgaaaacaaacagaggctaattattcagagcttgctctagcaagggagttgaccaccatcacttctgcttagtagagactcaaaggcaggaaggggagtgagaaaacttcatagttataaaaggggaaggtttcaggtatgctctgactggatcttgctgttggaagctggaggcaggctaagtaggagcagggcattttgtggtttgggaagcatatttaactttctctgattgatcctaagttggaagcaggggcaaaaattggggaaattgactcattgagcaagacctaattcttttgggccatttgctgcagcagttgtagtttgatttcttggactggttgctgctaaagtgtttttgtttcctgagctgattgctgcagaaactgtgggtcagagttagttgtattgctatttatggtctggccattgcccacttgcatatttagtctctcacagtagaatcctgacattgtagatattaaaaaaaaaaaactgcctttaaaatcaaaacaattgaactcatggagaaagagagtagaaggatggttaccagaggctgggaagggtagtgggagagctgggggaggaaggtggggatggataatggataccaaaaaatggaatgaataaggtgtagtatttgattgcacaacaggctatagtcaataataatttaattgtaaatttaaaaatcactaaaagagtataattgggttgtttgtaacattatggataaatgcttgaggtgatggatatctcgttttccatgatgtgattattatgcattgcatgcctgtatcaaaatatctcatatactccatacatatatacacctactaagtacccacaaaaatttaaaataaaattccttttaaaaataaagaaaaaaaccacctacctaatggaccacattttattttttagctattgaactagcagtcacaccataacagtatttgttcattcaacactttaaactttttaatgtactttcaaatacatcattctcccttttatccttacaacaaccttgtgatcctgagaggttaattacttgaggtcactgaatgacttttggctagaataaggattagataatattacagagtgacttgtaatatataactcaaattgttaggtatagataatccatacaaatggctttaaaataaatattttgggtttcatgctatgatgaaggatctgttccatttgcttccaatttagttgcgtaaagttgagataaaatcttgaaggaagggtcatagcaccatttaaatacccacaggtctgtcatgtggaagaagtattaggtttattcctatgactccagagggcagaactagtacaagtgagtagaagacaggcagatttcaactaagaatatgaaatgtctttctaataatgagacacttgcccccaaaagaaggtgttgacttgtgaaagaaccagttcctcatctcttatagtgtttaaaaagaacgccataatagaactccataatcctagagactcctttaactggtcacaccagctaacctccaggaccttcgtagatttcaagtttatgaaatgttgttgaactttgaaaagaggcacagatattttgaatacaacagtttaaagtcattcaaattctggatgaaattatttcgttatgctcctcaaaaacagtgagttctatttgaagttttacccccagactctcctttgaattagtatttttgcccatatacccatatattttcaagaaatttctttctttccttccttccttccttccttcctttcttccttccttcttccttccttcctttcttccttttgagatagggtcctgctctgtcatccaagctggggtgcagtggggtgttcacggctcattgcagcctcgacctcccggactcaagcagtcctcccaactcaactcccaagtagctaggacgacaggcatgcaccaccacgcccagctatttttgtattttttgtagagatggggtttcatcatgttgcccagacttgtcatgaacacatggcctcaagctagcccacctcccacttcagcctcccaaagtgctgggattacaggcatgagccactgcacctggccaagaacattcaaaactttaaaactgaaaattgtcctaataaggagtctactaacttaatcttccatcagcattgttttctgatttcacagaaaactttacaacaaatgtattgcattcattcttgatgttttaagaaattaaaggaattagacaaggtaaaaacaaaaacaaatctatctctttaaagatggcaaggactaggattttaatctgtaatcttaaatttttgaaaaagatcttttccttcttaatgacttctttttaaatggtccttcaggttgaacacaattacattcttttatagtatacagtaatgaagctgaaataaaacagtgagttctcttccacacgtaaattgtgattgttcaatgttctgcaaggtcttctgatggccccattctcaccctgctccttacctgcctctttaactctttaaatctaatcccctaatttttatcagaaaagtatttcctttttacgataggctgtggtttctgcctttaaaaaaacaatcctggggtttctctcagaatctggaagaagtcattgcaatggtaaagtaggtaagaggctggggtggaaagaaatgccttctgcataaatctagttagtctgagtcgttttttgacaacttccgggaccagacttcaggcagtgctggaaattgttctctttaccatatctttttttttttaactgtacatatttacatacatacacatatggtgagggagagaacgtgatgacgtgagactctccatggagagtaggaggtaataaagaaataaaacaggtgtctgaggagaggttctattagagaggggagaatagagagtaattatcgttcagacaggcaagagttctctgcaggtagcagcctgggaaagcgaactcgcgcaccctcttgggggacgggctcttttgctttctatttcttctcctgcagccagggtgcacacgtatttgaaacagaccgaatttcctcctcgatgtggcgtcaggttgacttttcgagactagcgggtatttctttttaatgactccaatgcctttttattattgctgttattgaggttgagggagaagagatcggtctaaattctggctgggtaagtggggggattctcggcgatgagaaacgggggacttagaagccggaggaaaatcagcagccccacatctccacttctccagtccgccctactctccacccgtgacctccagtggagaccccaggcggcagcatcagtatttgatcggcccttcgtcagcacgctgccagccctggccggctgggttcgccaggcatcacccgctcggctctgaagcggacgcctggccctgcaccgggctttggaaggaccctctctgcgctcgccccctccccagggtggctccgctttcgagcccgggcgcggtgcccaccatgcgcggctgcctgcggctcgcgctgctctgcgcgctgccctggctcctgctggcggcgtcgcccgggcacccggcgaaatcccccaggcagcccccggcaccgcgccgcgaccccttcgacgctgccaggggcgccgatttcgatcatgtctacagcggggtggtgaacctcagcaccgagaacatctactctttcaactacaccagccagcccgaccaggtaagacactcgctcccctcgctcgactcctagaacttgccagatctcagagccccgtcgctgctttggagtcccctgggaattgaccttgggagacttcggggaccaggggactttctttccctttctcctccgaagcaatcgctgccctgccctagctgcctcaacacgcctcggggacaactctgcttcgcctcgcgcctctcctggcctggtcaagggcattgctgggctttgcagaggcaccagttccccgcaccgtctgcgggtcctgggtccctgctgggtctttctccaggaaagtcctgatttctagggttgcggggtgtggtgtggagtgcgaagaagaaccgcacctcggttcctaatcccctgcagggaagaaacctaatttcaagtggct

SEQ ID NO: 96 - DNA, 6000 bp, Homo sapiens
gactttgtgtgagcaacaaggctgtttatttcacctgggtgcaggtgggctgagtctgaaaagggagtcagcaaagggtggtgggattatcattagttcttataggtttgggataggtgtacaaattacattctcaagagtggggagaatattgcaaagtaccttcttaagtggggtggaggggagaatatatcatatcagttagagtggggcaggaacaaatcaccatggtggaatgtcatcagttaaggctattttcacttcttttgtggatcttcagttgcttccggccatctggatgtgtacgtgcaggtcacaggggatatgacggcttagcttgggctcagaggcctgacactcaccacatggcagctggctttccttaaaggaagtgatctgaaagggaacaaggtggaagctgtagtggcttttctgacctgtcctgtgaaatcacactctgtcatttccacaatatcctcttggtcacactgtttagccctattgagtgtgggcagagaccacacagcagcatgaatacctggaggtgtgactcctcaggtgccatcttggatgtgggcttaatagttttgattcagcatctttattattataaagagtttggctgggtgcggtggctcacgcctgtaatcccagcactttgggaggccaaggcgggcggatcatgagggcaagagatcgagaccatcctggccaacatggcaaaagcctatctctaataaaaatatcaaaattagcagggcgttgtcacacgcctatagtcccagctactcaggaggctgaggcaggagaatcacttgaacccggaggcggaggttgcagtgaactgagatcacaccactgcactccagcctggcgacagagcaagactccgtctcaaaaaacaaaacaaagcaaaacaaaacaaaacacacaaaaaagagttttagtcaggcacagtgacgcatgcctgtagtcccagcactgtgggaaactgaggcaggtggctcacttgagcccaggggtttgagaccagcctgggcaacatggcaaaaccctctccctacaaaacatacaaaattagcagtgcatagtggcacacacgtgtagtcccagctactccagaagctgaggtgggaggatcccttgagcccaggaggtcgaggtggcagtgagccacagttgtgtcattgcactccagcctggacgacagagggagatcctgtctcaaaataaataaataaaaataaaaataaacagttttgacttcacaactagctaaaaagtgtattccctcactcagtgactgtactgttcagaggtgtatacctgcattaaaagccctttccttccttctctgtaactggagtagggaagggctatctcattggactggagtaacacacacagataaagccggatgcaaagttaacaggaaacactatttctctcaaggatacgctttgtttgttttttttttgagatgaagtctcgctctgtcacccgaggtggagtgcaatggcacgatctctgctcactgcagcctctgcctcctgggttcaagtgattctctggcctcagcctcccaagtagctgggattacaggagcacaccagtacgcccagctaatttttgtatttttagtagagacagggtttcaccatgttggccaggctggtctcaaactcctgacctcaggtgatctgcctgtcttggcctcccaaagtggtgggatttcaggtgtgagccaccacgctggccaaggacatggtttcttacagagactttgttctctaaattcataaattgttggaaattctatcagtaaaaatgaaacatccgagtcttgctgacaggatctaatccacttgatacagagtagcagccttgatttccaaagcaggtgcacagcttcagataaagggtttctggatgcaacatttcacatgtaccttcttgtttccagcgattcaggacactggtttcacttcacagtcctgatccaatgttgaccttgctttgctctaagctatcatttggttgtcacctaagctctaccctccccctttatcttggctttttcttttcttttttctttttgagacaggctcttcctctgtcacccagtctgattgcagtgatgcaattgatcacagctcacggcagccgggacctcccaagctcaaacaatcttcccacctcagcctcccaagtagctgggactacaggcacgcaccaccacatccagctaattttcttttttttctgcttccttttctttttgtttttttttagatagaggcttgctctgttgcccaggctggggtgcagtggcacgatcttggctcactgcaacctctgcctcttgggttcaagcgattctcctgcctcagcctcccaagcagctgggactgcaggcacgcgccaccactcccagctaatttttttgtatttttagtggagacggggtttcgccatgttggctaggctggtcacaaactcctgacctcagatgatacacccacttcggcctcccacacagctggtattacaggtgtgagctaccacgcccggccccccctcctttcttttgttttttagttgacacagggtctcaccatggtacagcccaggctggtcctgaactcctggcttcaggtgatcctcctgccttggcctcccaaagtgctgggactataggaatgagccatcacacctggcccctttcttcaattttcaaaacaaactgatccttcaaggtcaagaggaaatacctcctctgagaagtcttctctgaatgtcagaggcagacaatgtctgatttctgcatgctccccaacattcaatcatacagttattgaataacacattttgagagataactatgaatcaagtaacatgctggtttctgggagaattgaggacaaattaaccttgtggaaattttgggtggatgaaaaaaaccaacatgaaattaaaacactgcacacatttacagctgtgagaagcattacacatcctgggtgctatgcgagctttttttttttttttttttttttttgagttggagtttccctcttgttactgaggctggagtgcaaggtcacgatctcagctcactgcaacctctgcctccagattcaaacgattcccctgcctcagctcccgagtagctgggactacaggtgcctgccaccacacctggctaatttagaatttttagtagggatagggtttcaccgtgttggccaggctggtctcaaactcctgacctcaggtgatctacccatctcggcctcccaaagtgctgggattacagaagtgagccactgagcccaaccaggagctttttcgagaaagaaggaagtccaagagatcttcctgacaccctagtctgactctgccctttgcctgctcaaaatttccccatgcttcccagcggccttctggacatagatcaagtcccttctctgacaggcccaaaccctttatcatctgatcctagctcatttttctgagttttccttagttgctattattttctgtctaaagtgacatgtcataatattcataaagcacacaagtcttatgtgtacagctcaatgaattgtaaatatgtgtatacccggccgggcacagtggctcacgcctgtaatcccagcactttgggaggccgaggcaggtggatcacttgaggtcaggagcttgagaccagcctgaccaacatagtgaaaccccatctttactaaaaatacaaaattagctgggcgtggtgtcgcatgcctgcaattccagctacttgggaggctgaggcaggagaattgcttgaacccggaggcagaggttgcagtaagccgagatcgtgccattgcactccatcctgggcaacaagagcaaaactccgtctcaaaataataataataataataataataataataataataatgtgtatacccatgtaaacaccattcagataaaaatatggcatatttggggcacccggggagtgtctcttgtggcccctcccctccataccctgctgatctatcagcacagattagtttctgccactttttaaacttcatattccttttctttttacacaaacacaaacattcgagtcatgactgggtggggtggctcaagcctgtaatctcagcactttgggaggccaaggtgcgaggatcgcttgagtctgggagttcagagaccagcctgggcaacatagagagacctcatctccacataaaaagttttaaaaattaaccaggggcggtgtagtcccagctactcaggaggctgaggtgggaggcttcagcccgggaattccagactgcagtgagccatgattgggccactgcactccagcctgggcaacacagtgagaccctgtctcaaaaaaaaaaaaaaaaaaaacaggaaaaaacaaacaaacagaaaagcaggcctggcgcggtagctcatgcctgtaatcccagcgctttggaaggctgagacggggttatctcttgggctcacaagttagagacaagcctgggcgtgggctatattgctagatccaggtctctgcaaaaaacaaaaccactcagtttttagtcatctataacgtcctgcctggaagcatgctattttgggcctctgagcttttgcacttgctaattccttctgcgctggggagagctcaaaccctgcccgaaacttctaaaaatggtgcctggataaatgaaggcattagagctgcgattggacggacggctgttggacggcgccactgctggcacttatcgggagatgctcattggacagtcacgtgacgggaccaaacctcccgagggagcgaggcaggtgcggtcacgtgacccggcggcgctgcggggcagcggccattttgcggggcggccacgtgaaggacgcacgttcagcggggctctcacgtgacccgggcgcgctgcggccgcccgcgcggacccggcgagaggcggcggcgggagcggcggtgatggacgggtccggggagcagcccagaggcgggggtgaggcgggaggcagacgggcgggaggagggcgagccccctcgccggcccgtccgggatccttcctaccggcctggggctgtgcgatctccaagcactgaggggcagaaactcccggatcgggcgctgccagcctccagtcccctccgtcctcggaggttcctggctctctgatccccgtgtcccgatccctgcctctctggcgctctcggaccctcgagaaccaggggatctcggaagccaagcccccgggcaggcccgggcttgtcgcccgcaccacttcctgcctctggcactggtgggaggggcgggtctcgcctctgccccctcaggccaggggtctggatgcatatagcgttcccctagcctctttccccggggagaatgtaggatacaggcccagcctcctggcctttctccatcagggactcagttgtctgggcccccccgtcactttatctgctagggtcccagaagtccagggtccccagctctgtcctccctcaggggccgtgagtctccacagtctcctgatcccctagaacccaagagtccaggtacctcttcccttcctttctcctctagggcccaccagctctgagcagatcatgaagacaggggcccttttgcttcaggggtgagtttgaggtctgattattgtggcacagatttgaggagtgacaccccgttctgattctgcaccctcactccatccccactctagtttcatccaggatcgagcagggcgaatggggggggaggcacccgagctggccctggacccggtgcctcaggatgcgtccaccaagaagctgagcgagtgtctcaagcgcatcggggacgaactggacagtaacatggagctgcagaggtgtgggcccctgaggacccagaagtccagccactgggctccttcaggacacaggactctcagccccgcattctcctcctcccctaagaactagga

SEQ ID NO: 97 - DNA, 6000 bp, Homo sapiens
gagactccatctcaaaaccaaaccaaaccaaacaaaacaagaaaaagttcctgtgcaagtaacctagaagaagaaaagaaaaagaaaaaataaatgagagaaccgaaataaaaataaaatggcagacttaaaccataacaatatgataattacattaaatgtaaatggtctaaatataccaactaaaaaacagacattggcagaatggattttttaaaatgatataagtatatgttgtctacaagaaactcccttcaaatataatgatggtctatgtagaaaaccccaagtaagctacaaacaaagccaaacaccaaaaacccaaaccctcctggattacagaagacaatagatgccaaaaaaaagaaccctatatctgtatttaataagtgagttcaacaagattacaggatacaagatcaacatacaaaaatcaattttacctctatatgctacaaattaacatgtggaaactgaaattaaatatacctaacatttataattacttattttaaaaaaggtataaatttgaccaaatgtgtatagaacttgtatgctgaaaactatacaacatttatgaaggaatcaaagaacaactaaataaatggacatatatacccatgttcatggattggaagacttaatagtaaaaatgtcagttctcgaagaatatacatgtttaatgcaattcctatcataatcccagcaaaatttttaatgaatataaacaaggttattttaaaatttatattgaaaggtgaaggaactagaatcgttcaaagaatcttgtagactgagtgtggtagctcacatttgtaatcccagtgcattgggaggtcacagtgggagggtggcttaaggccgggagttcaagaccagcctgggcaacatggagagattccttctctaccaaaaaaaaaaaaaaaaaaaaaaaaaaaaaaaagtcttgtaaatgaagaataaagtgagaggaaccagcctattcaatttcaagatttatagagaacttcaataatcaagactgtgtggtattggtggaggaatagacacagaccaaagaaacaaaagagagaacccagaaatagacctgtacaagcaggcagctgaattttacaaaagtgcaaaagcaattcagtggaggaaaggcagccttttcaacaaactgtgctggagcaatgggacatgtagagacaaatgaaccttgatctaaatctcacactccagacaaaaagtaactcaaaatagcttacagacttaagcataaaatgtaaatctatacaacttttagagaaaaacacaggagaaaatctcttgaggtaggactacacagagttcttagacttgacaccaaatgcataatccataaaacaaaaaattgataaattgtttctgatcaaaatgaaaacttttgctctgcaaaagaccttgttaaaaggattaaaagacaagctacagactggaagaaaatatttgcaatcacacatctagtatctagtagactaatgtctagaatataccaagaactctcaaaactcaacagtaagaaaacaacaagcaaacaattaaaaaatagccaaaggctgcaatgaacggagatcgtaccaacgcactccagactgggtgacagaacgagaccctgtctcaaaaaaaagaaaaaagaaaagaaaagaaagaaagaaaatagcctaaaggatgggcgtggtggctcatgcctgtaattccagcactttgggaggctgaggccggtcagatcgcctgagctcaggaatttgagaccaccctgggcaacatgatgaaaccccgtctctactaaaatacaaaaagttagccaggtgtggtggcctgcacctgtagtcccagctactagggaggctgaggcatgagaattgtttgagcctgggaggtggaggttgcaatgaaacaagatggcgccactgcacttcagcttgggctacagagtgaggctcagtctcaaaaaaaaaaaaaaaaaaaggggggtggggggcaagaaaatagccgaaagacaagaaaagacattttactgaatgggatatatagatggcaaatacgcacatgaaacaacattagccattaggcaaaagcaaattaaaaaccacagtgaaatatcatcactacacacttaacagaaagactaaaatttttaaaatggtgacaacactacatgctgacatgaatgctgagagactggttctctcctacactgctggtaggaatgtaaaatgctacagtcactctggaaaacattttggcattctctttaaaaacttgcaatttccctacagctcagcaattgcactcctgggccctcatctcagagaatgaagacttaggttcacacaaaaacatgtacacggaggtttacagcagctttattcttaatcaacaaacactggaaacaacgcagatatccttcagcagatgacctgttagacacactgtggtacttccatactgtggactgctacacccaacccacctggaattatgctgaatgaaaaggtgaatcctagaggttatgtactttatgattctattcataaaatatccttgaaatgacaaaattttagaaatggagaacaaattagcagttgccaggggttctaggggagtgaggatgagagggaagtggatgtggctataaaagcataccactttgtggggtagagacgttctgtagcttgactacagatattctatcagtgtcagtatcctgttgtgatatttactgtggtttgtgagaagttgccattgcaggaaactgagtaaagggcacatagcatctctctttattatttgttacaactgcatgcgaatctacaattatctcagaataagtttaattaaaagaaaaagccagatacagaacaatacgatctgtctcttaactcccaaattcccagttggctggccacacaccacagtctcagttctgtccataaccaagtttgggggatctcttcaagtttgcaaatgtcacttctactgagatccctctgacaacttcagtgaagtctctcctcaaagctttttttttttttttttttttttgagacagagccttgctctgtcgctcaggctggagtgcaatcactgcaacctctgtctcccgggttcaagcgattctcctgcctcagcctcccgagtagctgggattacaggtgcccgctaccatgcccagctaatttttgtatttttagtagagatggggtttcaccatgttggtcaggctggtctccagctcctgacctcagatgatccacctgcctggcctcccaaaggactgggattacaggcgtgagccactgagcccggcctctcctccaaattttcaagctgtgtattttaaatcataaaatgttagagccaggaacatttgaaataatgccttgataaaagcgtccatcagacccccgagcacccttcctttccatgaattataaccaacggaaatccggtgcacttagcatgtccagctttgagtgaagcccccaagcttcctgcccctgagactgccgcccctaaacctctcttgcatggattctgtagagctgccccgaccagaagtcacttagccactcctctgctccaggcctcgtggcctgctggaggccagacagtgggtaagtcacgctcagcagtgcctacaactcaagccactgctcaaaggctgttgttttatttctcaagttagaccacaggctctgtagcaacttgggcctccttggacacacacagtgtgacgctgagacacagtcctcaacgctgctatggtgtagaattttttgcggagaaagacaggaaggcctcttgaggtcagtgtgagacagggacactccactggggcataggtatatcactcacaggttgaaggtaggtagactgaggctcaaagagcaagcggaggagctaatgttcaacccaggtggtgtggagtctcagtccagtggccttaccctccacggccacgttgctagttatactggacagagctcagactgtgccctggcctgtgtagatgcaccagaggttttatctgggggtcacagccgctgggaacgggagagttgctggggattgccaggaagggacaaggcatttgtagccatgcaccatctgcttttacactaccctagagtcaagtggaccccctccagcatttttttttccccgagatggagtctcactctgtcacccaggctgaagtgcaatggtgtggtatcggctcactgcaacctctgcctcccgggttcaagcgattctcctgagtagctgggactacaggcgcatgccaccacgaccggttaattgcccctccagcattgtatgtgtctgactgcaatgaagtgtgagtgtgtctgtgtgcgactgtgtgtgtatgatgtgagtgtgtctgtgtctatgtgggggccaggtgtatagtctgcatatgtctgtgcacctctgtgtctctgtgggttgtctgtgcctatgtctcggcttgtgtgtgtgcatgcatgtgtggtctgtgtgtgtctgtatgcatgtggtatctctgggatgtgtgtctgtatgtccctgcgtgcagtgtagtgactttgggagtgcacatgtgtacacgtgtggtgagtgtgcggccctgcgcgagttgtctgtgtacgtgtggtgcctgtgggtctgtgtgcgcgcgtgtgcccgtgggtgtggtgtgtcctcccgcgctgaggctcccatgaacccagctcagttcaggcctccctgacagtcctcgggcggccaccccggggcgcggctgtccacgaggcgcggaggagaggagtgcgtggctgggtcggcgggcggcgcccccgctcctccccgcgggccgggcacacgtgggccccgggcgccgcctccccgcgccgcccgccgcccgccgggtcccgcgcgtccccacccacctcgggccgcccccgccgccgagccggcccagggataaagtggcggcgcagacgccgcaccctgtcgccgcgaagccggtcgcgcgcagctcgtcccggccctggcccgccgcaaacgaggatccgctgcgctcggggaacgcgacagcggcgctcgtggccccggtaactgcctcccggcccctgccccagcccgccagtgccgccgtcaggggtggggagcagcactggggtcccggacacgcccggcgtgggctcccgctacccatgtgtgcgtgtgtgtgtgtgcacggtgtgtgtgcgcgcgtgtccgagtgtgcgcgcgtgtgcgcgcgcgcgcgccctccctgctccttcgcaccagcccccaaaccaacttgtccccatcaactccatctttctagtccccaccttccccggtgcagacacccggcgaagcccacccggttttcccagcggcatttccgatgacagcttcggggctacgtgtcctgtgctgtcggagacgcacaggaagcaaagtttgtgagaagccttgggggcgactttgccttgggcacccgcatttgtgcgtctgcgaggtgcctcggtgtgcgcggagctagtttcccagtttcccgggcccctcccttctccgagcccctctagcgatttgtttaggaaaagtgatgacatgaactagtagtggagaatcgcagcgccgctccccgccctggggagggaggggagccccggagagcctgccggtgggagctggaagcaggctcccggctgagcgccccagcccgaaaggcagggtctgggtgcgggaagagggctcggagctgccttcctgctgccttggggccgcccagatgagggaacagcccgatttgcctggttctgattctccaggctgtcgtggttgtggaatgcaaacgccagcacataatggaaacaggtttgtcatgtatccttggaatttcagatgggaggaataatctgagtatcatccacctcattattgtgcccacttgaaactgttccttggagattttaagatagatgggtcttcttgcagctg

SEQ ID NO: 98 - DNA, 6000 bp, Homo sapiens
aaaaaggataacatgttcagcactagaaaatttgagtttaagagatgacaaggatagtaaagcagaggtgataggaatttgggctgcacaaagataatttgggaggtcatccccatgagaataggggttacatgaggaggaagagaagacaaaataagacagagtagcagtcagaagaatagaaaaaagatgtaaagtaagctctgtgatcatggaagaaaagtctagctcttctacttaccagctgtaccacttaacacctctctgctgcagtttctgtatcataaaaatgagataataatagttccaaattcattgattgggttgtcataaggattaaataagttaacacataaaaagcacttacctggtaagtgccatgtcaatcttagctaagagaatagagattctccaatgtttcaggtctattgtacccccttgcccatttttctgcactttttgttttctagccctcagttaatgcctagaataatgcttggcacattatgactttcaaaaaatggtgaataacaaaagaggatgatggattagagttatcagtggagtaggcaattgtcaaactctcttttcctagagttggcttgagtggaaataccattgatgcaaagcaagcataaaatggtagaaataggtacaaaccatcagtgactggcaggaaaaggaaagagggattacggtaatgaaaaaagaaaagagaggcaagggatagttaagctcaaatatgaaatgtctggatacacatgattattactcatgtttaattcctaatccagacattgaattttacattatctccctgtatccttttatcaattataaaatgtgacaattattggctttttagtcatattatactgtaggaaataattgctttaaaataacaataacttgggaggctgaggcagcagatcaggaagtcaggagtttgagaccagtttggccaatatagtgaaaccccgtccctactaaaaatacaaaaaattagctgggtgtggtggtgtgtgcctgtaatcccagctactcaggaagctgaggcaggagaattgcatgaaccctggaggcggaggttgcagtgagccaagattgtgccattagactccagcccaggcaacaatgcaagactctgtctcaaaaaataaaaataaataaaataaaaacaataacttagcaaataggttttggatgcttaatagcacaatgaaagaaatatgcttaaactgtcagggaaataattttcttttggtatctatatctatatatgttctttatggttaactgcttactattctttaaacattaccacatttaataatctattatatagctaccatatttgaattcaattataacctccttaagccttttggtatttgcttcctcacagcctttttatttaattaagttcatacttttactttattaccaatggatacagtactgggcttctttttatatacatcattgagactagggtagctctgatacatgagcaggaaatggaagagagcaggggattgaggcaaatactgtagttttctagtgacaatcagaaatcattagggactcaagtggcattagcaatggctgcttgaagcactgtaaggttatcttatcaggcacaggggcttgtatctcatatgttaaggattgctgctgctttctctaaccagagttgtaaggaaaactaggcacacatgaaagaaagacattaaatcaatatttttttcctccaagactgaggataattcagagtgagaaagtaaaaattagttcagagtaagactgtaaatagctgcttggtcattaattgagctgggataacaaacccaggtaaaccctgctgcaaagttaatgggaaataactaagtatatgctgacactataaagtataatagcaaggcccttctttgagtgtttgctttctaattcactgaaaaactttgttctctaaaatcatatactctaggaaaacttgctgcttgaaattacatcagtaagaatgaaacaccctacttttgcttggggggatctacatcattttcatacaaagaagcagcctcaattaaggggctcctgaatacaacattccacatctatggtaactttgtagttttcaagaaacaggatcctgagactgttctacagtccctattggatacatatagtcctgctttgagtttatcaaacactgcttcctttaaatttcacctaatcccatccttccctaaaattctataaatttatcttttttgtttcctgagatacctctggtgttcagtttccctcattggaatgtgttttaggtggttcttgcagtgctataaagaaatacctgagcctgagtaatgcataagaaaataggtttaattggctcatgattctgcagcctgtacaggaaacacagtgctggcatatgcttctgggtaggcctcaggtagcttttactcatggtggaaggcgaagtgggagcaggcacatcacatggccagagcaggagagagagagaaagagagagagagacttttaaaacaccagatcacctgtgaactcagagcaagagctcacttatcaccaaggcgatggcccaagccattcttgagggttctgtcctcatgatccagagctcccaccaggccccacctccaacattgaggattacaattcaacatcacatctgggcagggacaaatacccactttatatcagaaggcatcagtaagctcaactttgtcagactatagtttggcagatttgtcctgttggtattgggctaactgggttaggacaaagaggcatgaaaatctagttaagtttgatgccagtgaagtataatagtcttttgaggcaatgaaaatgtataagaaaagtaggattcaacagcatgatgttatgtgaaccagaaatgccacaaaaatggctcagcaacatttgacccaccactttaattgggatctctgtgtgtgtgtgtgtgtgcgtgtgcgtgtgtgtgcatgtgtgtgtgtgtaaaatgcgcttcctcaccagaaggaatgatagttcctagttgattctaccacctaggacaggaaaaaacaaaacctcttgttgccagaaattaaaacatgcttcaaaaagctagtgcaggccaggtgtggtggttcacacctgtaatcccagaactttggggggctgaggtgggaggattgttttaggtggggagttcgagaactagcctgggcaacaaagtgagacgcccccacccacaatctctacaagaagaaaaaaagacaaaaaaaaaaaaaaagtaaaaacagctggtgcagacttgaaaacagaggcaggcttacaagtgccttttggaacaaattgagcatttagaaattatacttaattgatgtaagctgacactataatgatagtccaaaatgggacaagataaaccatacaaagcagtagctgtaaaacgaaggactatatgatataatatttttaatttttaaaattaatttcacgtacatatatgaatattgtttaaatgtatgcataagtacatacacagtagagaactgaataattctactagtggaaactgtatcaattacaataagggaagattagcaccagtgagcacacttactaccaggtagaggaaaagtccaacactattgcaaaatgagattaatcaaatgtctgcctctacaaagtcaactctggtctcctgggagcccctcccaatattaatatgatgctaataaggcatgcaaaatgttccaacaatgttaacagaccagatatatctatatgtatatttaacaagacaatggtatacaaccaaccctctaaaaggacaattttggggaaagaacatgctgcagaaggtgtgggctgctgggcagctcagaatcttgcatccctattcctgtaagtgctgaggtattttcatattattttaaaccaatccacatatcttgaacatcatttatttcaccaatgaattatttctaatatcaattatgatagctaattaacatcccctagtgaaagtggagattatagtggttaaaatgcctgttgatatatctaattttttttgttttttgagacgaagtctcgctgtgtcgcccaggctggagtgcaggggcgcaatctcggctcactgcaatctcccgggttcaagtgattctcccgcttcggcctcctgagtagctgggattaccggtgcgcgccaccacgcccggctaattttttgtatttttagtaaagacggggtttcgccatattggccaggctggtctcgaactcctgaccttaggtgatccatctgcctcgacttcccaaagtgctgggattacaggcgtgagccaccacgcccggccgatacatctgattttttaaaggccgttttgttgtgcgaagatcattagttagaatgcctggctgggtaaatacaaccgatgactgctgacgatatggaacaggcacaagacttctgaacgatatgtagaataaattataacttatctagaacacaaggtaacagtggaagataatgagccaggtggaagttacaaatgttgccgcaagtagtttctgttactttacgagttctgggagcttctctaacagctttgacaggagtgaatccccaaggctaaacccaaatccttatttgccgcctactcacgcctttgtgaggactacgattcccagacggcaacgctcccttcactcaacttccttagctggcggggagacgcagtttacagaactacctccccaaccgaatttcacacacctgtcacctaggacgcggccgggaaggcctcccttcgatccgcgttctccccattttggggtgtagcttggattcctgagcccagttttagtgcgtggccgaccgggaggccggcgaggcgctctaggccgagcggcttcgtctctatgaccacaaggggcggtccccggtgtcctgcgcgggggcgcggagggggcgggcgtcagttccgcggggggctgtcggggaaccatggctgccccgagaggtgagaactgggtctgctgggagtggggagtccgcggggggcggcggcgggcgagcatctgcgctggtcagcccctgtcgggcagcggagcaccctggttgcccagtgcctctggggcctggctgaggcgtcaggagtttgcgtggagccgctcccggcagtcagggcagcctgccttccgctgcggctgcagtctccgcggctgactccgcgctgggcaggtcggagtcagagaccgcactgacctccactagctgggagtgggtgggaaccgaattctgacaggccggggctgcggcggacccggagagaggccagggcgtgggtccggggctggaccgcattacccagcgaggcaggacagttcttcaccctggccccgcggctccggtctcctctgcgcctcctaccctgtggatgctcagaggcttaaaggcaggctccgggcgcagatcccatgcggcggctgggccatgcaacaaccactaaagacatcactggggcgtcaaaacagcactgaaatcgtaacgaaaggaagataacagtcgttaacagttcccacctgtatgctgtgtgtaattatagagaatgctgtatgctgctatttggggtggaagctgagatccacctccctcctcctgagggatggcacattcgggtgaaggcgtatttgttgactaattgacatttaaggagggcgagtctaattgactccgcaccactttttgctgagcagtgtgtgtaagttgggaccagaggtggattctttgactgtggtgcattaaccaggagaagttgggcaacacccggattcttgctccacccttcctccatagagcacttggcttcacccttgaataaatattgaacgaatacataaggaatatcttcttgcgtgggtttcaagttattttccctgttgcggggtccatgtttctcatcaggccctgcccagggg

SEQ ID NO: 99 - DNA, 6000 bp, Homo sapiens
acttcgtgcagaattgagaagtggggatttccagcatgaggtgcacactatccatgtagaagagttttcatatcaatctatgattcctgaataggtataatgtgctctttttttcccccagagaaaataaagaagttcattgtcagttgattactttttaaaaatggaaaacatttagctttaataaatattaaagctaatatttttaaatattgtttaaaaatattttaattttgaaaattgtttaaaatatatttttacatttgttacatataactaaattttattgtatatgtgcttataagtgtgtgtgtgtgtgtgtgtgtgtgtgtgtgtgtgttgagacagagtcaccttctgttacccaggctggagtgcagtggcgcaatctcggctcactgcaacctccgccctcctgggtgcaagcaatttttgtgcctcagtcttctgagtagctgggattacaggtgtgcactaccacgcccggctaatttttgtatttttagtagagacggggtttcaccatattggccaggctggtctccaactcctgacccacgtgatccacccaccttggcctccgtgctggggttacaggcgtgggccaccacaccccgccaaatgtcggtttttaaaatcacaaacaacattgaaactagtttttgcaaatgagagcaatcaccttagctatgtgtttattcttcagtgaatatagaaaaacagtatttgagatcaattacttccatgtttctcatgataatgctctatgtataggaaagataacatcctcaagcctattttcttggattttattattgtattgtattatacattaatatttataaaatattggaattatttgagtgatagttctgtagagatatctttaagagtaatttaattttaaaaaattttaaattattagtagatttaatgtgttaacataggcattctgctgttcaaaagtgcttccaaaatcagcacactcacctctggggctttccaagcagaagttttaagtcccctactcttcttagaaaatagaagggggtaatgttggaagtgtgccaggagtaagccttggtatttttcatgaagtgccacggtgaaagtaccttctcccacaagtcagttccttttagcaaaataataatctcatctagctttcctaaccgtgcttttcccagaaagcctgtctcctcattgaagatggcgacacactagataattcagtattattttgtctgtgcttgtgaccattcctgtacttacttcatttagagttttaacatctatttaccaagtttacacaactgccagttaaaaatgcaaaagtgcattttcctcaatgtaaatagtttagaaacatcaaaaataaaagtgtgagtttctccttttccttctgccgctcacctgatgttaaaaatgtggtgcttagtgaagcaggactcccacccccgagtcagagaaccaggattggaatcacagctctgccactgattggcaagtgactccaggtaagtttttaatctcaccgtacctcagtatcctcatttgtaaaatggaagtagtaattgtactctttacacgcctgttgtgaggattaaatggatttttaagtgtgactatgctattagtgtttcctattatcctttctagaaactttctttgcttatatagataaaatcatgtttacggttctttagaaacatgggatgatattgctctgtaacttacttcttttacttcataatcatgaacatctttccaaaactacataatattcttaagtagctgcattatattcaaaactgtgataggcaataatactttccaccatttgtatattaacagctattcacattttttctttttgtggttttataaaaatgctatactaaacatccttttgtctctttctttatgtattgatatgtttgattcccagatacagaattgcttcatcaaatgatatttgcaatttttaatttttaaaatcaacactgccagatcactttctaaaaagcacaaaagcaactcagcagtgcaccaattaggctgtacagtagggagttaaaaagccagccaagtagtatgactatggtagcacaaagggagggagggagaaagtggcagaattttatctgaaggtagactgtgataaattatggatgtgcattgtaaacccagagctgccaccaaaataataaaacaaggatgcatataaaacaaactaacatgaagagaaaacagaatcctaaaaatgctcaaaccaaaagaaagtaggaaaagaggaaaaaaaggaacaaatagaaaaacggatggaaaaaatagaaaaatagcacaatggtagacttaaacttcaccatatctataatcgcattacatgtgaacaatctaaacactccaatcaaaaggcagagattgtcaaaatgggtaaaatgggaaaaaagagccaaatgtaatgctgtcactttaaatgatatagataaattaaaagtaaaaagatagattgagatagatcatctaaatgctattcataagaaaggtgaaatggctatataattaatatcaaagtggacatgagaatttgattttaccaccaatcaaggaagacatataataatgataaacgtctcaattcatcaggaagacataataattctaaatgtttatacctctaagtagagcttcaagaatatgaaaaaactgacagaaataaaaggaaaaatagacaaatacagttattgttggaaatttccacactttttctcagaacaagtaacggaaaatcagtatggatatttcagcctatttgacctgattgacactcataatgtactttactgacaacagcaaaatacatagctttttcaagtgcacatggaattttgaccaagatatgccatgtgctgggctaaaagtaaggcaagtgaatagttctggcaatccaggaattcaaaacaggttatattctattggcatgggacaagtatcttcatataaacagttaccttatgatatggtttggctctgtccccaccccaaatctcatcttcaattcccacgtgttgtggcagggacctggtgggaggtaattgaatcatggctgcaggtctttcccgtgctgttcttgtgaagtgagtaagtctcatgagatctgatggttttaaaaatgggagtttccttgcacaagctctctctttgcctgctgccatccaggaaagatgtgacttgctcctccttgcctttcaccatgattgtgagacctccccagccacatggaactgtaagtccgttaaacctctttcttttgtaaattgccctgtctttatcagcagcatgaaaacggactaatacatgatacaaaggagggattatacgtatggatccaacatcgacctagaatgtgaggaaagacacaatcctaagcaagtaatgacaaacaaaaacaacaggatgctattgagatggagcaggaacccatcttaggagcctgtggagcacccctaagcatggaaataaaggaaaatcttgagttccttcaagggaaattccaggtacctagctagccctaagaagtaaataagtaacttgataagcaagaaggtaattatagcttaaaacaataaccaaggaagttagattccctatagaaacgaaagataacatcttaacatatgtccctgaattgtttctcagaaacccagacccccaacaaaacagatccactggcatgcagacctcagacaagggggaaatgaggacggaactgaccaccattctttcttctaaatttcttcctgaagggcaaggaggaagtcacacccacgagccagagctaacattcatttttgctgaccccaaatttttaacaaagcttctcttccttcactgatggcaagtcagaaaatctttgaatgtataacctataagcaccctcactttaaagattttcaagatatcccagcttgttagaccaaaccaatgtgcaacctccgtgtattatgattttgcctgtaacttctgctttcttgaaattaaccctgcgtttaaaaatccttacttgcaagccaactgaaggtcaggatttaagcaagagctgccccattctccttgcctggagctctgcagataagcgccctcttttctcccagtgcaaaccttagtgcggatggcttggccttactgcaccagaagaacggacctcagtttttaggtaacactgtgccccagacatctggccactttatgtctgaaagggccaatgtggtgatgggggctgggggacgcctcaaggctggcggagcctggtgcctttctagaatttggtgggtgcaggacgggtgaggggcggaggcagaggatcaggagaagaaaaagagatagtggctgctggccccaacattttgaagcaaagaacaagaggagtattttacgaagattggcggatggtgtattgtgttgatgccttaactgcagtcgacgaaatctccaggaaggatcctcctcccgttcattctcgacggtggcgcatccactttcggaaggccgggcctcgaagggtgggcgcgcggggcaggagcaggaccaccccgatgcccccattccttcccgggaggcggggcccacaggcctggggtgcggcaaggcaggagccagtgccgtgaagggcaacccagggctggtctcccgccaacctgtctgcagcccgagcacctgggccaggggcggagaccggaccaaggaggcaccgggcgcggcgaacacccccggggcccctccccgagcggggccccgcgtcccaccgcaaaccaggggagcttgggcaccacctggctggcaccgccgggcccggccggaggggggcgcaggagggcggcgcgggggcaggtgcggggcggggcacgggggcgggaccacacagggccgcggcagccgcgcccgctgggccacagaggccgctgaggccgcggcgcccgccagcctgtcccgcgccatggccccgcgcgcccggcggcgccgcccgctgttcgcgctgctgctgctctgcgcgctgctcgcccggctgcaggtaaggagcgcccgcgcctgccgggccgcgcggcccgacgcctcctcgggagccccgggaagggccggggccggcggcatcctggctcctccgccttccgagaggagccggagttttggggagcggaggccgtgggaagctggggaggcgcttccagagttggacggcggagggcgggaaagggcaagcggagggaaactggggcgcagaaggagcaggttggcgggaccgcaacacccgaaacgggctcttccaaaagcccctcttagccgcaggctttgatgctgtcattttctccaaatgcttcttgagcacctactaagcgcttgcgccgggcggtgccgcgggagacagcgccgtgggcacctcacttgcggcagataaccgttcccgatacgatttctcccgggtggcctccgtcccaaatttccacccggaaagagacatgattccctccgtccctgaactgcgggcttgcctttgcctcccctgagccccttcggggacacccctgccagctcgcctggaggccccgcacggcggggagagactgcgcgcgcgccccggggatgctggacttgaccctcgcagacccgagtggcttcccggtcctctcggaacaggtttctcagtacagttagcaagcgaatgcagccaggcacggactttctgcctcgtggaggagggccgcagagggaagcacacccagcacaacaaacgctttaaaaatcgttgatacgaacttgaaagctctcacagggaagggcgagtggtggttttcttggtttcggctgggtcagatttcccctctgttaacactaggttaggctgctgccgtccctccgcagccgggcacggaacccggagaggcgtggggagggacgcatggagaatcgtgtttgggtgagaagagaggggaaaagcct

SEQ ID NO: 100 - DNA, 6000 bp, Homo sapiens
ttttctgtaactataaagttatttcaaaataaaaagttggaaaaataaattatctttttttagttggccaactatactatattctattctgggtgccacatttaaaaaattctattgaaagaccctatccggacaagagcaagcagaatgccaaagtgttaaaaaggttggggatgtttaacctagagcagaaaaaagttaggcaagatataacaatctgccttcgaagtatgaattgctatcatgtataaaagagattgagacttgtcagtgtggtactagagggcaaaattagcatgcttgactggaggtagtaatgaggaaaggttttataatatcattataaggaaggactttgtaaccatttcagccaatccaaaccaaagaatgggttgctttgggagaccaggaattgcctaacaacttgttaaaaaatatcacagaggagtgtcatgtataccaggcatgttaagtagatcagtgcgtctcaaactttaattgcgtatgaatcactacggactcattaacaatgcagattctgattcagtagttctggggtgggggctgagggtctgcatttctaacaagcttccaagtgatgcctataatgctggtatgtggacaagactttgagaagcaaggagctgtataatattcaaggtcacttttcaatactaaagtctataattctcatagaaagacatacttcaggagcagagacagcagttatgcactgagagtttaatacgaaaatggcaatgtttgagagcacagaggaagcaagagcattgcctgcaagcagaagcagggatgctctgcaactcactcagtaaatgcatattttaaaagaacctgttaaagaaagaacctaaatacttgtatatggccacatttaattatccattttcattagaaaagatcaattatttctagcaagtggaatttatggcactcactgcttccattttaataattcaattcaattctacattaaattcaagattttgtgtttatctagttcattcagcaaaaatccttcataattattcatccacctcaaagcctttgcagtgtatagactttgcttttttactcttttacttccatttctataggtcagagcatcccaaccagtagaattaaagatgtccctcaagatatttggtcttctaatcacttgggaaggccaggtgagtagcttgttgctgagctcttggaactcaaccaagtcgtgtccaccaccttgatgctgtatttacttcagcaacctgctgcaagcatgtctatttccatcatgtgaaaagtgtctgtggatctgctggaggagttcatactctaagtacttaattagcatagcacacccaccaaaatttggtcacgggaggagatatcatgagaaagtaattcagggacttctggcaggtgtatctttaagtggtaaccccaatatcagtctttgtgtatactagatacttttctcaatttgtggtaaagttggtagatggtaacttctctaaaaggtgtgtgtattttccaatttacaatttcaatattattttgtcatacttgacctgtaaaatttagatggattctgaatctataggcattttcatatagaactccaatgataaatatgtcaagaaaataaagacggctatattatttaaaatagaattttgcaaaaaagtttcattgacagcagctattaagaatataaaaagatcatttgtcattaaaatgttttaattagaaatgatatatagcctttttaagcataaaacttcagataaaaacttatattggtgaaagcatattcagatttctcaatttaaagttattaatatgcaatttaatgtattgcccaaaatgttatattttattttgttatcataattgtatcatgtaaagaaaatgttatgaatctcttcacccagctccatacagatgtcttcaaatttcctccagtttaccccagtgtgccacacaaatattgttattttctatgttggaaaacactgctataggtaggtttgcccctataatgtgttctgctaccaaaaatcttctagtttaattacagactaatttgttacacctttgagttaatgtgcagttaatgttacccatagcaaacaggcaagtctacatgataactggaaaatgttaaacctacattatttccttacccattctttaacatctcttgaagatctaggaatattattctgttattctgtgggtctagaaatgtttttcttggcccaaatggttacactgtgtccactttgtgataaatattgggtacattgtttagtatgcccaagggtatatgttttatttcgtagtaacaaaatgtttaaaacatttgtttcctaagactaaagagatatggtgatctatagatctcctttgagcatattcttacttcctgctcttaatagcttcttttactctccaagaaaccttaatgaatgcttagctgtatcactgggcagttgtgagcatcatgaaaggcatggcaatcacttgataacttataatggaaacacgtcctcttaatttctggagtatccggttttctatataaattaatcacatgaatcaaatgctattaaaaccaacttaagggtgataattggctcttccaatttataatacgaaatataacactgatgggcctggaggtcactaccatgatctacaaatcagggtaggactagcccttgaaacaaaaagttaaaatggattctaaatctacttgcacctctagtcttggcagaaatttatttcttctgcatgccagaagttctggcaaagaggttcataggataaaaatcagacaatagcagattaacttactgatatctgtattgtgtggatgaggatattatcttctttttgtgagagtttacttggccctgttaggtatataaaccaaatgtttattccaggcttctatggtgctccatttaagacaaatgcctcattaatgagagagacacggaccctattgccaacactctgccaaactgatttacttgaacaataataagaaagggacaaatatgttcctcctctgacacatctaccgttataaaacatttgccctgggcttctcttgccttgctagtgcacagttagtgtctgtctgctgtgagaatgaaacacccttgagagcttgaggccacaactcaggccgaggtgtgaagggaaaagaagacagcttacccagccatcaacattcacacatgtggatttacagaacagacaacaaagctatcaatcggagcccattccatttcatctcatgtgagttacattattgtaaaacacttaaccatgtcacatggcttattaacattggcatttgattttgtaaagatgctttatgtttaaagaaattatgtagtgcacatttctgcaaacgtggaggcaaatgaaaaattagcactacagagcctgatcctccaccaagtcttgtctcatttgcttcttgtaaggaacatctcttgcttcctttctccacttgtttatatgctttctttccaaccttctcccctttcttctatttctacagcatagatcgcgccctcgggcggttgagctttaaaaaacaacaacaacaacaacaaaaaaaaaaacaaacttcccaggtgcagcatactctctcaattccacctcccggcgattttacttttggcctgagtccaacacgttcccaagagctggacacaagttgtcacgatcatgaacctaaccacactcccccctgcggccaatttcctattttgctgttcaaaagagggaaatgcacatatcaaaaggaaaacagcttggtgctggccagctgcagaagggtggaggtctttggtgctcagaagagagagcagctcctgcggcagtcctgcgtgtgtcgctgtccagacctcggtgctgaatactaggcactggtatctcccgccaggttcaatccctcagggttcgaataggctccaccatgggagactgaactcacttccctagggtgaggggtggagaattcatttagatgtttccttgctctcctcccacaggaaaccatttttccacaaagaggcattgtgcattttatgggaaagtaatggcacagctccagctcagcaccaaagtgaagagctctactgaggcacaatggaaagtcgaggtaaataaaaactgctctttccctccctgaatcaacacaacagcttttgggatcctagatccccttgttgacgaattcttaaaaatatgtttttttaaaatcacatgattaatcattttactgataaacaccctaaaaggtggtggtggcgctggctttgcaatatcggagtataactactgatattgttttactgaggttgagaaacaaaggggaggagggaagtaaacttgtaaactaaggtggcttgaatggttaaaaattcatttttaatagtattgctttaacatagacatgctaattttctcagacaatttagaacagaattgggacagtagtagcttcccttcttctccttactctcctagcctctctctttgaaagacctaagagccttgttcttcatagcaggtgctgatgcccaaagggccattataagaatcctatagcctccccccctccccgccacacacatgagataataaagtaaatacagagaaaatggatggaagggagggaaagcactcccagcctttgattcttggtagttatgttcaagtggggcacttctctttgaaaagtgaaaatgtttctcacggtacagaatttatgggcagacaaggagcagacttaactgatcccagcaaacagttccttccttttcctaatccctggctgcttattttagccgcttctccgccccgccgggaataccattcggatcttagtccaggtagatctgacgtcaagagatggctttcgtcgatttgacgtgtaaacactcatttccattctggctgggaagggctggggctccactcagcctggagaccgaagcgcttcactgagcgctcgccgccgcccagcctctcctctcgcgcctcctagctcttcgcagagcaaccaggagccaggagtggtctagagcccgagggtgggaagggggagtctgtctggcttttctcctatcttgcttctttttcctcttcccttcccactcttgttcaagcgagtgtgtgagctatggagcgaagagcctggagtctgcagtgcactgctttcgtcctcttttgcgcttggtgtgcactgaacagtgcaaaagcgaaaaggcaatttgtcaatgaatgggcagcggagatccccgggggcccggaagcagcctcggccatcgccgaggagctgggctatgaccttttgggtcaggtaagagtttccactttcaagaaactttctggggccccaggggactggcgggactggagcgcggtcttccaagtgggagccccaggttgcactctccagagcccagagtagcaaagagcaaggagctgctccagccctcgcccctgtcgcgcttggagagagagaaagcttgcattatttactgtttaggctgggcgcagccaagcagaaggaagccgctgcagctgggtagggcttatgcttactgttggccgctctagaattgaaatccgttcccgcgcggtttggaagaaaaatccctccacgcttgttcagggaacttgagatacactcaagctcttaccaaccaagcgcccccgggagaagcagtgcgctccatcccccgggactgaggcggtctgcgtcaggagccggctgttgccttcttttcaatatggcagcatcagatccaagtcctgatgcaaggggctaagcaggcttggggctgtccgccctggcagcctgtaagggcacgcccagggcattggaagagtgccagctgctgggactcgcgaccaggaggttgggaggccgcggagtagcctgggaagctggggggagaaatggtgggtgaa

SEQ ID NO: 101 - DNA, 6000 bp, Homo sapiens; identical to SEQ ID NO: 8

SEQ ID NO: 102 - DNA, 6000 bp, Homo sapiens
cgatcacacacatgggtgtgacctgctcagctcctaaccccacgccggggagtgtctcagacccatgccccccacccttgcccctcggtgtgcccactggacaagcagcatatcaggtctgtgcctctgggtgggggggggtgggggtctctgcttcagcagcgggccccgcccaggctggagtccagtggactcactgcggggcttctccgcttgtgaaataggggcgggtgggcgctggggacgtggcctcaaaggcgggatgcgttgggttccttgcggcgccggcttgtgcccacagcttggggccgacattcatcctggggagatagagacagggctcctctgccgccctggtgccggggtgccccagggatgtggccccatgtgccaaatcacagtcactcgggttggcaggcgacggagggctctctgcctcttctgggggtgctgagacccctgtaccctcgactccccacctccagggatctcacccccaggtgcccatctcctctgtggggggcctgagccaccactgaccccacattaaggccactgacgtccccgtcctaggccagccagcccctgagaagcacccagtgctttgctgtgggacacaaagccacacatggctattcacgttatttcattaagttacataaaactggaggtccagggcctcagtcaccatggggagaggtcctcagtcgccatggggagaggtccgggtcctcagtcgccgtggggagaggtctggggcctcagtcactgtggtggacagcgattggtgggggcagggacatttcctttgtcttggaaagttctggacgctggtggtgtctggacactggagaacgggtctgtgttcaggccccagacctgaaggtgggatgagggagagaggaaggaggaggaaggggaggagggaggggacagagtgggaaggagaaggatgtgaatggagaggaaggatgggaggaggaaggaaggaaggagggaaggggaggaggaggaaggagaggagggtgcagaggatgggggaaggaggggggaggagggtgtgaaggggaaggagggaggagggagcggaggactgagaaggggaggaaggtgtaaaaggagagggagagaggaaggaagggagggggtattaagggggaagagagtgggaagggggaggagggaggggagggtagtatgaagggggaaggaaggagggaggggagaagggtgggaaggggaggaaggagagagggagggaggggaaggtgtgaagggaaggagggaggggaggtgggagggaagtagggagggggagggaggggaaaggtgtgaagggaaggagggaggggaggagggagggaggagggtgtgaagggaggagggggaggagggtgggaggggaggagggagggaggagggtgtgaaggtgtgaagggaggagggagggaggggaggagggagggaggagggtgtgaagggaggagggagggaggagggtgtgaagggaggagggagggaggggaggagggagggaggagagtgtgaagagaggagaatgggaaggatgggagctggggaggagggaggagggtgagctgggaatggggctgtgtgcctgctcttttccaccactggctgcaggggttgcaggaatcttgggtccatggctggatgggggtggggattttcatgttacccactggagaaagggatacatttttattttcaaggacagcgacccagcccaggggaaacgcccctggcccctggggctaagcgcagaccccagctccgtgcttcgcaggtggggggcgatggacagcggtggggctcccgccctgagtggagcctgtgacctgcccgggccccagcgccccgtgacccctgccgcctgatccttgcctggctgagatggggcttctgaaggctgccggcaccagggcaggcagcgcattgggtccaatttattctgtaatgagaaattctccccgcatatttttagcttcctcctggcgtcgcggcctttgaaggctgaggggctgcgggacgctgatcccaagccctgtggcctggccatgtgggcagtgggtgctgggcacgggctggacaagtcccttcctgagtctgggtagaccccagtcccagcagtgcagagcagggggcggggccagaccccatcaagccctgtactggctccagaccagggactgagggcgaccctggataacccctgaccttggcggacacctgttcccagagtgagcctgatttctgacccttggctccacaggaagcttactctagagtgacctccggccgcggctgcgtcccaaagccgggacagctcccagccccaggagggaacagggcttcttggacccccacagtggcccccctgccaggcaggggtttgccggggcagcctcgcccagggccaggcctcggagacgccctgccctcccctcccttccccaggtccttcctctaggagcggccagcgggcgcggggaggttgaatgggggacgcaccgcctttgttcccgtccctgcttgggctctgaccttgagagagacaagaacagaaggaaaacggagcttctgctcaaatccgttcagcggtggcggtggtggcggctctcgcctcggtggcccctgcatgcaaatgagtggccctgccatgcctgggtggaggtggtgcccttccagctcccacctgtgcaggtcccagtcctggtttgagaagagaccccctcctcccgaccctggcccacccctcctcacccacgagatcccttgaagcaggagggggcttctggtcccagggtagaaggaagcttccagaactcccacctttgccaggtggcatgctggggccgggcacgccaagaccccaggctcacggccccttgtcctgtgcttgggtgcagccgccacactctgctccgaaagtgctcacctccgggagtggccgtccccctccctaaaagagccccccaccagacggagccgcccgggaagcttctccagcctgtctgggctacagagccttgtgtggctagaacccaaggccctcactccaggggtgctgagagagcctgtccagagggcctgcctcagccaccacctgggacaggttcacgccctccactgaagagacacccggccagccctgggccttcgacctgggacgtctgtagtggggtcaggggatgagacctggagctcagaacagacgggctgagctccctggaggagagagaactgagaaccttgtcctggcagggacgctagagcactgggtgggacagacctttctggaagagcaagattttaacaggaagaaaaagtggaaggacttcccagcaggacccagcctgaacaaaggtcaggtggtgtggcccgcgtggcccgctggggaatcgggggaggagggcacgcaggagacacaggacagagcccaccacgtctcagagctgtgggacggtggtgggtccggtccccaccccaccttgctggggcacaggttagcttgcccatctctgggttcacggtccctgccaggagtttgggtaatgcctcacacagggaccttcgggtccaagggctgttggtgcttgccctgcagttccctctcctgcactgggcctggtgaatgacactaattcagagacgtacaacacgatctgggcatcgccagcaaagtccagccagcgtttgatgacagcctaccctccacaagctcagagtctggtgagggaggctgtggcatgaataagggcaaaaacagagggcaggccaggtgcagtggctcacgcctgtaatcctagcactttgggaagcccaggtgggaagatcgcctgagcccaggagttcaagaccagcgtggccaacatggccagacactgtctctatagattggaaaaaagacaaagcagaggccaggcccccagttccccacctgtgtcagcctaccaggaggagaaatcactcggcgttccctgaacagatcagaccccgggtctttgcacaagctgtgcccccgggcagcggccctcccctgcctgcaggattcgtgcgtggagactgatttgctgtcggccggggcttcactctgggcttcttggatcccatccccagctgctcacactccacatcggtccacctactatgctcccggcacccttagggctgaggtgtagggacttactccatccccagggaacagcgtgggtccggagaggcgactcccaggagggccccagggaggtcgcagcccgagcagctttggactttggccagcgcccctctgaaactctgccccggcccccgcagggagactggagttggccgagcccgatttgggacgcgtgcgtcggggttggtgaggctgcggatagcgctggaaccgggcaggtgagaggcccgggacccagggccgggccgggtggagcgcgtgggggcgcgggaggcagggtgcgcccccgcccctcggagaccccaggccgggccacgcggatgccggcggggggcgcgcagaatcggggtcgctgggggcaggccccgggggacgagcctgagacggggtgggccggggcagggggcgggcgcaggctggagacccccgcccagtccccgcgcggccggggcacggcgggagggggcgcccgcggccctcccgacgctcgggcgggacaaaggccggagcccgggcccctccccggcgggtgcggcggcggcggcccgcgctccgacagtccgcgcggccgggtcctgcgcccggggcgaccccggcgccccgccccgccgccgcctgacttctcggcgcccgaggtcgcgcgcgcggaggcgggggcggcccgggatctccaagcgccgccgcgccctcctcccgcccgccctccgcccgcccgctcggcggcggcggcggcggcggaggaggcggagaaggctggcaggcggcggccgggagagcgagcgcggcggccggaccggggccatggcgcccgcgcagcgcccgctgctcccgctgctgctcctgctgttaccgctgccgccgccgcccttcgcgcgcgccgaggacgccgcccgcgccaactcggaccgctacgccgtctactggaaccgcagcaaccccaggtgagcgcggccgcgcgcggggggcgcccggggaccccccaacgccccccaagccgcgcccggcctcgcgcccccggagctccgggcgccccccacgcgcgcgccgccgccgggatgcgggcgcccggttcccgcgggagccccccagggagctccggccccccggagtttgggggactcgcccttttcgcgcctgccttccccggggcgccccattgccctacggactgtggggactcgcgccccacatcccccagagcgccgacgtctcctggagtttggggaacccctctggtaccctccgatgccgggtagcccctgagttgcctgcctggacttggggggacccctgatccacccgcttctctggggagccccctcggtttcgcatttggtggggatccccggggaccttggcaccggaggtgggggactgtggccctcgagggatctctgggttcgtcctgcccgcaggtccccagatgaacttggggaagttggagtgtccctccctcaggacccagcatctgcttcactccagggggccaagggcccagctttgaaaggagactgaggggccggggagctgggggtcagccccgggaggggcagtgggatggagtcctctcttgtcctctgggcgctgaccaggaaactgaggtgcagaggggatgaggagctggctcaaggtcatgcaagggggggacttgggggcaggacccaggtggcccagtgccctgcctgccacgcccggccgagatgccgcacccgcctgctgcaggcccccttgttttgaaccaggtccgggccaggcacaacgtgggggacaggagaagcccccgttggtcagagcaaaaaaag

SEQ ID NO: 103 - DNA, 6000 bp, Homo sapiens
tatcccaaagttgttcacttttcagggtgtcacaggaccaccttttgtctctcagcagaggaaaatataaaagtggtttacccaggggaaacttaatcattcaaatatttgggcaaatgtttaaagactcagataccaaaaaacaaataaagctttgcctattaataattgcaagatcccctaacatctctcccaaggggtaagataagctgatactgtaaataagggcaaatggactccccacaagctattttgtgaaaaagtttcaaaagaatatccatatctgcttaaaaattcaatcttagctttgtaataccaaactgttttaaaagcagggaagatgaaaatttgagaacagtttgtgtgtgtgtgtgtatgtgtgtgtgtgtgtgtgtatgtataaaatggacaaaagaaacacaggaagaaaccttataaatttctaaaatgttgcagttataataaccccactgtacaccctaatttgatcaaattgtccttaattgaaatcattgattaaaatagtggtgggagtacctagcttaagaattgttatagaaaatcattttgtaaaggaggaaacaataatcaatgcccaatttgtaagttttggaaacaatttacattatataggttaccttaagtgggggggttctttttatccaacattgtgttatgaaaaatttcaaacacacaaaaaagctgaaggaactttacagtgaacacctgtatacttagcacttatattctactattaatattgcattatcaacatgttttatcacatatctatccatccttctgtccattttatcaatccaccaatgttgctgcattttatttttgatgcacgcacttccaaattagtttgcagacatcagtacacttccaaatggttctttttaaaactcactgaatgttatttttcaaaatatctgatacgtaaatattttcttgatcaccatcttaagatataccttaagaatgcagtaaatatgaacctagaagcctttcctacaaataagaaaagccaaaaggttgttttactagaggccaaattgttaccttgagccagctaagaaccgagtcgtgccaaaactgtgtaggtgatggaggcaatgggaagctcgctgtcaggacagtgggaatgtggaaggagaaaggcagtgattgttttaacagggcacctcggtgtttaacacgggtctatgtgggaagggattagcaactttcacagctatttaggaataaaacgggaaagaacccaaagaagggcgggggtggaagggggcaatagagcctgcagaaaaaggagtgttaagccagaaaaggggtgtgtgtgtggtcagttggtggggtttaactgagtcaaaagggaccacagcaggggagccggttaactggtagtgacactcacacttctcccccctcccaaacccccaatcttccatctaagggtgtgtgtaacggtgcgggggaagagtctggggcagaagcgtacctcgcacacgcgcgtgaacacgcgcgcacacacatgcacacgcatacatatctcctgacgtggtgatctccgtggccggggtgggggcgtgggactccggggaggctccgcagaggggcagcgggcgcgggagaatcccgggatccgggttcacccatccatcctctgtcccctgccgcgtgcccgcgcgccgccggccgcccgcctgccgggcccagtcgcccccctttcactttcgcgtctgcgtaggtgtctgcccgagcgggcacgagggcgcgggggcgcgccaggagacgcgggggcgcgcggcgcgccgcgagcggaggaggaggggtcccggctctcggccccttcctcggcttgccccgccgagccgcctccgcgggcgtctgagccgccgtcagagcgaggggaccggtcgcgaccgcagcgccccagccagctccccgcacgcctccgcgcacagacgcccgctccctcctcggcgcccccccacggcgggggtggggcagaggcgcggcgagcccgagaggggcggggagaggagcagcctggcggggtgggcagccgaggagcaggaaaagaaaacttttccctcccgccccccgcgcgaggtccccagccctcgcctccccccgcaggtgggaactgcacctgaagccgggcgcgaggtcagggccggactttggagggctgcgggcagggctgaagggggtgcgtgcatttgggctcagttttcctttggcctccaggttgtcagtggccgtagtgggagggcggctgccggcgcccctgcccgtttcccacccgcgggtggccggacgcggtgccgcctcctcccgctcgtgagggcgtgacccggggaggggggcgcaggctccccctgcgaccgccccctcacacacgcgctcggccgccggagctgtcaccggccacccagggcccggggagggggcgcggagagtggcgctgcggagcggcgggcgcgggatcctcctgccggacttcccggctcccagggacgccgctgtcaacgccgagcggacgcgcagccccgggagaggggcccgccagaggcccggccgccgccgctgggggcgggcgggtgcccgcgtccccctctgcgcgatttggcgccgctgcctcgccgcctcttgtagggtaacagcactattgctctacccaccgtcagcagggcgactgccactgccgggattatcatcctctccatcctcaccgccgatcagccaatattggacttgctggtggcggcggcagcagcggcggcgggagtctagccgttccccttcccccgccccagcctccccaccatgtcctagaaaaggtgagtgcagcgacagtcactttgcgctgacagcggcgagagggggtccggagagcgcaggggcggccccgggcaaggcaggttgcgcgcccagggcagagggcgcgggttggcgagcggaggtgggatgcgggcaggagacgagttgcccgctggcggccctggggcaagggtgctgggtggcgggcgagtgatcgcggcggctgcccctgcacggttctaacctagattttgcaagaagctgagatccagggcaagaccggccctcctcaaaggagataaaaacttagtaaaagagacacgtccattcctttaataatgaataattcggcaacgcttgcggagccgccgccgcctcgcgtgcccaggctctaggtccgggactccccttgctcccgcccgccgcccgcgctctgccgacgtgagatcgatgcccagttcgctgggccgggagagtgcgcgtgacggtgggccccgcgggaaagttgggacgctcggcggggactcctggctgcggggacgccgggggcagctccaagctggggaccgaggggcattagagtctggggtcaggaccagctcgcggcgctgccgctgtcgcccctatctccagggagttcctgactggagcggctgagagttcaagtctcagccctgggttaggggtccggaatcccggagcttaactaactgttaaggagaggaggggcctttgggcacagggtgtcccccggtcccccgcctcgggctttggcgggcgcgaagcgagggtgaggcgggaggccgcacagctgccgccgccgggctgcgggtcgccgagggccgggggaccagatttaggtgtatacgtcactgatgctgactccgggccagcggggagcctaaaacggggccttacatgagaagcctaaaagtccttagaaatcaaagttaggaaccccatccttttgcttagtaactgcagcatttgggtgggcgggaggagaatcgaggagggggcggttggagggaaaccgaaatttcttcatgcagacaaccgatccttagaaaacagtttggttccttcccccctcctgtctgtttctcccacttatgtgacccaccccctccacccattataacgtgaatatcctcgatggtaagcttgctttcaaattgaactagtggaaaaatccaatactaaagtagtaagtacagtgacaaaattataaggaagtagaggagcagctcttgaccctgccacttctttcatttatctttctctctctctcttttttttttttttttttttttttttttttttggtgttaggggtctaagggatgggaggaaagctgtgtttaaagggtttttccagcacggttaaaacaactaaattcaaatcgagtgaacgtgatcgtcttgctcgctggcagcgaaggctgctgctgctctgctgagaggtaactctggagacagtggaaaggggctgggagaggaacctcgagggtcgggtgaagcccacccagagtcctccccgcgcgcggacgctgttgggcggcgccagggtctgggctgcagctcacctggagctgcaggtggagagcgtgaggggacgacactttgctcgcggaaaaaccgacttcttccgcgtcagcacacttttcacatctctccagatatcctggggtcggtcagaaggagagcagggtggacgtaagcaagtttggggcggccgagcgatgggggtgggggcagcgtgcggaggccgcctgatgtagccaccgcccggcaccccaagctcccgccgcggctgcggctttaaggaagctgccgagtccaggctgtgtcgcagcaactttgtatcagtcatgtcgcccgcctggtgactgacagcctggattgtccaataagaagcccgcctgacccgtgcggcgtggagccttgcttctcttcgggccaataggaagggttcaggggggcgggatagcaacctgaactttatctggacatgtgacccgcttttaaaagggccagccctccagctggcccactccccctccgggctttcgcccgccctctctccctcccttttttgcccgccctggccctgcccctgcccctgccccctcctctcagcccctccgcgcccggggtgtcattgggcccgggagacgggagccaacttcaggctgctcagaggaagcccgtgcagtcagtcacctgggtgcaagagcgttgctgcctcgggctctcccgctgcagggagagcggcactcgctggcctggatgtggttggatttaggggggctccgcagcaggggtttcgtggcggtggcaagcgctgcaacaggtagacggcgagagacggaccccggccgaggcaggtgtgtaggggcgcgcggcggggcaccgcttgccgtgctcggcgtgcggccgcggcgcgggagcgtgcactttgcagggagaagtggctgcgtaatccggaggcacagtcagtatggtgctgtgtgcttgttgttttgttttggttttccacttttctccccctttggccgccagaggactattttgggaaagtttggccactttggataaatgccctctaactagcagcttttaactgcctttggcagtgggaggtctaccacccttccctttacccaaagatgaatttcggatcattttccctgtacaatttttaaaggacgtttgaataatatttctttcctttatcaattgcggacgctcccaaatctcagccggaggtgtagcgcataagggcagttgaaggagatatagatcctaatagatcctgtataaaaggggctctggaaattcgtgcatttcccgttcgctagcattcgcgaaactcttgagacaggctacgcttcctatggcatcagttggaattttaagggcaagggagaaggggacgaagcttcttttggtggcatccttactctgctactgaattttaggtgcgtggctttgcctactcaatttaaaaagaccaggtttaaataataatggtttatggcaccatcagttttaattatttattatgacataggagttaggaaaacttttgatagcagacgagcttttgaaaccgccgaattttaaaggcaccaaattgcttcctaacattttgtattgccatttctctaggtgc

SEQ ID NO: 104 - DNA, 6000 bp, Homo sapiens
gcaggcaaagagagagagcttatgcagaggaactccttttttttttttttggagacagagtcttcaattttgcccaggctggagtgcagcggtgcaatctcggctcactgcaacctccttctcccaggttcaagcaattcactctgcctcagcctccctagtagtttggattacaggtgcccaccaccatgcccagccagaactcttttaaaaaccatcagatctcatgagacttattcactatcacaagaacagcacaggaaagacttgcccccatgattcaattacctcccactgggttttaagatgagatgtgggtggggacacagccaaaccatatcacagctactgtgaaagcagagttggagggtcacttcagcctgggaggttgaggctgcagtgagacgtgttcatgccaatgcattccagcctgggtgacaaagtgagaccctgtaaaaaaaaaaaaaagaaaggaaagaaaggcttatgttttacccaaacaataccttactatgactggctctgtgtccccacccaaatctcatcttgtaggtcccataattcctacatgttgtgagagggacccggcagatgataattgaatcatgggggcaggtctttcccgtgctgttcttgtgatagtgaataagtctcatgagatctgatggttttaaaaatgagagtttccctgcacaagttctctcttctcttgtctgctgccatgtgagacatgactttcaccttccaccatgattatgaggcttccccagccatgtggaactgtaagtccaataaacctctttcttttgtaaatttcctagtcttgggtatgtctttatcagcagcatgaaaaagaactaacacagtaaattggtaccagtagagtgaggcactgctaaaaagatatccaaaaatatggaagcaactttggaactgggttaacagccagatgttggaacagtctggagggctcagaagaagacaggaaaatgcaggaaagtttagaactccctagaggcttgttaaatggctttgacaaaaatgctgataattatatggacaatgaaatccaatcaggtggtctcagatggagatgaggaacttgttgggaactggagcaaaggtgacttttgttatgttttagcaaagaggctggcggcactttgcccctgccatagagatttgtgaaactttgaactggagagagatgatttagggtatctgacagaagaaatttctaagcagcaaagcattcaagaggtgacttgggtgctgttaaaggcattcagtttttaagggaaacagaacataaaagtttggaaaatttgcagcctgacaacatgacagaaaagaaaatctcattttctgaggagaaattcaagctagctgtagaaatttgcataagtaaggaagatccgaatgttaatcaccaagacaatggggaaaacgggcatgtcagagatcttcatggcagctcctcccatcacaggcctggaggtttaggaagaaaaaatggttttgtgggccgggcccaggatccctctgctgtgtgcagtctaggaacttggtgccttgtgtcccagctgccccagctgtaactaaaaggggctgaggcatagcttgggctattgcttcagagggtggaagccccaagccttggcagcttccacttggtgttgagcctgtaggtacacagtagtcaagaattgaagtttgagagtctccacctaattgatacaaaaagcagataaacaggccaggcatgatggctcatgcctgtaatcccagcactttgggaagccaaggcaggtggatcacctgaagtcaggagtttgagaccagcccggccaacatggcaaaaccctgtctctactaaaaacacaaaaattagcgtgatgtggtggtgcgcacctgtagtcccagctatttgggaggcctaagcaggagaatcttttgaacctgggaggtggaggttgcagtgagctaagattgcaccactgcattccagcctggatgacagagcgagactccgtctcaagaaaaaaaaaacaaaaagcaaaaaacaaaaaaccagataaacagagaaaaattgaactgccattagagaagacggggagatgtgggaacccagagccttgtctttaacttcctactgattctctatcctcacagatttctgacacactaccagaggattcagggctccatgaaacataatttgaaaataactagcctaccttggcagttctcaaagtttgtagtatcaagaccccttggcatgtttaaaaattgaagactcaaagaagtttttttcatgtggattgtaactattggtatttaccatattagaaatgaaaactgataaattatatataaaagattaattccttaaaattgacaataagcccattacatgttaacataaatatcatattttaatgaaaaattactatattttaaaaacaaaagataagattggcattgttttacatttttgtaaatctctaatatctgacttaaaaaacagcttaattctatttgctttgatagcacattatagtctccacaaaacttcattgtacacttctgagagaacaagagtgaaaaaagcaagtaacacatgaaaactttttgacctcatggatcccagaaagaacctcggagattgtctacagtccccagctcacatttggagaacctctgtcctaaatccaaaggtccattctagctggcactgaaaattgacttaatttctgaaatcctattaaccgttttgaagagtctgattctaccaaaatactaaaaaagaatgtgaggtgaatactaaatagaaaaatgttgaattcaaaatgaagggactaagataagtggtttttattacaaagcaaactgtattagataacttaaatctatgtatgttcaaaaagatgtacttgtcatatctagtgcaattacttgtttacatatctcttctacccaacctgtgagctttgcaagaaggaaatgagtcttttttgtttggttatttttctgagacagtgtctcgttctgttccccaggctgcagggcagtggtgtgatctcggctcactgcaacagggagcctcctgagcagctgggattacaggtgcccaccgcctcacccggctaactttttgtatttttagtggagccggggtttcaccatgttggccaggctggtctggaactcctgacctcaggtgatccgcccgctatggcctcccaaagtgctgggattacaggcgtaaaccaccgtgcctggccaaaggaattgagtcttaatcccttttgcatcttcagtctttaggataacgtctgacacacaacaggcattaaatatttgttggatgaatgaactgaactgcatagaatgcagaaagcctacatatactggccaggcacagtggctcacacctgtaatcccagcactttgggaggccgagacgggcggatcacctgaggtcaggagtttgagaccagcctggtcaacatagcaaaacccggtctctattaaaaatataaaaattagccgggcatggttgtgggcgcctgtaatcccagctactcgggaggctgaggcaggagaatcgtttgaatctggaaggaggaggttgaggtgagccgagatcgcaccactgcactccagcctcggcgacaagagggagactccgtctcaaaacaaccaaccaacaagcctacatatcctgccacacgtgctacaatccacagcaaactgtttcatccacattcaaccactttcttaaagtcaccatcatgatcctatcaagaaaaccgtaatttatatggtattttaatgtgcctttataaattactaatcactttcttcatgatgtatgttaaaatggcttatgtcacctgatgtaatccttaatgagggaaataaaaggccatgattatgcctggctttttttcttatatgttagatttgagtgttaaaatgacctcgaagcggcgaaagaaaggaacggaactgccctccacattaaaaatgagcaggctccataggttaattttactcttcctcacgcacggcacttacatgttgcaaactctctgctccacagcacgcacagacatcccaaatcccggattgggcctgaggaacatctctgcaaagagcgccaggagggcgtgggggtcccgcctctctcgccagggaccagggagtggacactcactggtccagtcatgaggaactcagcatcctcctgacgggaggcgcctctttcccagaagcggtgggtcaggaggaatctgactaaaccctgggttgccggcccggagggcgcggttgaccccggggcctcgaggttgtgggcgaggagtaatccgcccgccgagaccgacccgcagatccaggagaccgaaacccgagggcggcgctccagggtgctgaggagaccggaaaggcggccaggaccttccggtcgcctcggcccaccacccacccagtgtccgcgcagccctaaagcctggcagacgcggagcgcacgcggcctttgcctcggccaggacagggcagcggggagagggctgctagacaacaattcttgacccctcctcgacccacgaccgccaggtaggcgcgcaaagctcctacacctgcggcgcgcccccgtcccctggtccagcggacacgccacgcacgcagccccgcccagcgccgctcgcggtaggggcggagccgctgagctggccaaagcggatttgcccagctaggccaggggcggggcaggccctcccagccaggaccagccccagtctccccgcccctgagccgtgaaggaaatagggacctggccctgggccttgtgtagcgggagggggagctaggaagcagctgagggcagaatccaggagggcctggctgcgggggaatgaagcctccgccttcgcaggcaaaagcctttaaatacgggctcaggcccgggactcagagtgtaacgcgtggcagcctgagggaggggcgtgcgccgagagggagctcagatcgagcggggcgcgggtggagaagctgcggcggcgcggcccgtaggaaggtgctgtccgaacgatcgggataggagcggtccctgcgcttgctgctgggaagtgggtaagcgccgctcccaggctggccccgccgcccgggcgggatgctcccaggtctgggcgggatgtggagggagcggggctggggtgtgcgcgctgctcccggtcgctcgctgcgctgggtcccgggcttcccgtctcacgaccttcgtctctttggggcttagggcgggaaccgcattttggaactgctgtcctggggatgtggtcgtctgggcttcttattcaagactcgtgagtcttccagccccttctctttctgcctttacccactttcctgacttggatgagatttccctgccgcctccaaagccgaacgcccaccacaggaagcggttctctcgttggggacctcattttggccgcagagtcgtagtcttttgtttgtgtttaagagtctgctcacctgaggggctcctgcttttctcatgccgcccctcttaagaaaccaaagagaaacgaagccagaaagccctcttgagagcaaaatactaagactgccgtgatatctgtccgggatgtcctggaatccattgttggccccctacaccacagaattgctctgtttgatgtcggggaaggcctttcctgggtgcctcgggagaccatgtttgtgtgagatcttgaaaaattatacgtcctataaatatataggaagataacttagtagggttaggaattctagtatagagaaaagaggggttcgctggtagggatctattcatgggcatacagagcagtagctgtctatcgacagacctcaaagacacagtgagcctttgagtttcttcaaatcccttaagaaatggagaacagtagtctttcttcaggggggttctggaaatgaaagagctgactgtctgctctg

SEQ ID NO: 105 - DNA, 6000 bp, Homo sapiens
tcactcacgtaatttactgagtagctgcaacatgccagcctctacgttaggttctgcggataaaggaggaataagacagagtcaggagaactgttccttgtggtttccgtcccttggggaccacaggcatcagcagtcccattcaagtcacctgaggcaaagtgtctgcatcttcgtccagcgaccctttgcttttcggctcctagaatccttagagtctgaattcctttagctgggaacagctgtcatggtcacccctggataacatttgccaccaagtatagatgctggatcttgggttccaggcagacatcatccaggtccatctggaactttcagtgatagctgccttcagccagcatctttgggggactctataatagcagcttgagatcagtgtctagaagactgttctgcaatttgctgccaaatgcatctcaggtttttaaagtcattgtttcttgctcatggtggctcatttattacatagtcccctcaccccactaatggataatgggaggaaaagttgctgcttccttcagcatcaaagcctttccttgggaatctgcctccctccatggcaggggtggattcgggagctgggagtaaccaggcaaagtcaaccagatgcctagctcctgctgagacccaggtcctatggcagctcctcattagattaaaggagaccacttccaaagcaggtgctgcatggctcaccatcatatgccccaaacaactgaaagttggcggttatcaccagactgtgagtttctggcaagtagcttggggaagctgaataaactctaggcccagggctactaaagacttcaggatagaattctccatcaaatatacagcataagtaaaactgctctgcactgtttaatccatttccaaggggcttagaaaagctaacaagggtgtgtcccctgtcctgccccaccggtttgctggctttgtaataacataagaccattgtggttgttggtgtcagataccttcccatcctgagctctctcacctacctgctctctctcctagagcaggatactggggtacttttaagaagggtgctccttttaagatgcccagaaaagctgtatttaactcttgctatttgtaacttggggatggtctcccctgccccagggcacataagagcaaaggctccaatggtcagtggatgactctgcaaaagtgaccccctgtgccagaagctatagccctctccccaacaggtctctcttgttggccagagggcctgcttcccatgggcattgcaagtgccaccgtgcggggcctggctctgcacacccaggaaaagtctgcagacccccagccctccgcaataattcaccagaccagaagccactggtgtacagagaacacttaaaaaaatgtattttatgtgaaaaaaaattaaaactctgtatactgtatcagcagctttgtgtaaaaatggcaatcaagagagtctaatatatttaaaacttttttaaaaaaaatcttcgcagatctttgatatcgtactgaggtaacttccacgtagccccttgccacgcggcaccggtgggccttgggtccaaaactgtggctcagccacatcccaaagggggcacatgtccctggagttgcttccagctgccaaggcctgtgacagaattcgctgttaagagtttttaattaaaattattaaattccttttaataacacctgctagtgtgagtgattattgctgtgagctcacttgaacagtgctgacttgaattcacaaagaggaggttcctggaatagagggtgggtgagagctcctagtctcttcccccttaccccacccctttcccacagagggctttcccatgagacccctgaaatagagggagctctgggggctcagacctggagcagatgtctccccagactaggagatggtgaaaactgatgaattcaagaaaaggtgggtggttgggaatgaccttcattctgtcaaataatctctttgaaattaacatgaggccgtatagtagcatatatttattccatacattttcaaagtttttcctgatatttatttatttatttttatttttttaagatggagcctcactctttcacccagtctggagtgcagtggcgtgatctcagctcactgcaacctctgcctcccgggttccagcaattctcctgcctcagcttcccaagtagctgagattacaggcgctcgccgtgatgtccagctaattttttgtatttttagtggagatagagtttcaccatgttggccaggctggtctccaactcctgacctcaagtgatcctcccgccttgagctcccgaagtgctgggattataggcgtgaaccaccacgccccgcctctcatgacatttatatgtaacaagggtgcccctctcctctgtcccattcttggagtgaactgacatgtcctgtcctcttccccctgccccattccactctttcccctcgtgtgcttattgtggggaagtacgatactataaagtacttcaccttatgacagcaatacagcagctaaggccccggccattctcattttttacctcgagcattaaaggcatagagaagctatgtggttgcacagcctcagaccacagtccttggtccttgtcccacacagaactttgttggtgtttttcttgaaagaggatgaaaagggtgtcggatcacaaggtcaggagttcgagaccagcctggccaacgtgatgaaaccccatctctactaaagatgcagaaaattggccaggtgtggtggcatgagcctgtaatcccagctactcaggaggctgaggcaggataatcgtttgaaccctggaggcggaggttgcagtgagccgagatcacgccattgcactccagcctgggtgacagggcaagactccgtctcaaaaaaaaaaaaaaaaaaaaaaaaaagaaggtgctctcttgcagcctcccggaccctggataccagcgcagggacacatggaagtccccacacttattcttgagaaacttcacaaagggatggggatggggagaggagaggtagagagggagaggcgtctcaacagcggcaggcattcatccatttaaaaaggttattggttgctaaataataatggtaacatctcacatttatgacccacttttcatttacataaaaaagatgacgactgaaaattgactgttggatttagctctgtggaactcatgatgaacctgacaagaggttttggtaaagcagtgggggttttagcctgattgaagagggctggaagggaactggagacagcaagtatagacaactggtttgagggtttcttttcttttcttttctttctttctttttctgagacagggtcttactctgtcacccaggctggggtgcagtggtgtgatcatagttcactacagctgcaaactcctgggctcaagtgatctcttgcctcagccttcccactggctgggaccatcatgagcactgccatgcactaaaagttaggcgcaccaccatgcccagctaacttttgtatttttttgtaaagacagggtctcactatgctgcccaggctggtctcaaactcctgggctcaagtgatcctcttcccttggcctcccacagtgctgggattacaggtgtaagtcaccatggccagccacatctgagattctatgctgcaaaaataagaagtgagatggggagctttagaggaatgtagggtcaagagagggttgttttaagatgaaaaatatttcagcatgcttgtaggctgatagaaatgaatcggtaaagagggaagctgatgttccaggagaaagaagaagattgctggagcgatgctggtgagtagtagaggggctggaaatgcccaggcagaggggttggggttggatgggcacaggcacagttcatcaatgcccagtatacgggcagagatgcagacaggaaggtagactagatggccgcacgtggacgttcccttcttactgtttctgtgttcttgctgacatggaagacaagctgtcagagaggaaaaggtagagagaatgagggaaatgcggcctaccaggcagtttttttgtttgtttgcttttgttttgttttgttttgtttttagatggagtttcgatcttgtcgcccaggctggagtgcagtggtgctatctcgactcactgcaacatccgcctcccgcgttcaagtgattctcctgcctcagcctcccgagtatctgggattacaggcgtacaccaagacacctggctaatttttgtatttttagtagagacggggtttcaccgtgttggtcaggctagtctcaaacgcctgaccttaggtgatccgccctcctcggcctcctaaagtgctgggattacaggcgtgagccaccgcgcccggcctcctagcaggcagtcttacggattatgaatttaaaacatgaccagtcagtaagcatggttacgctctttttgttttttcttcagccctgtagggctgccggggtgcaggtggaaagtagggtataaccacggttggttggggttttacaaggcaaaaatcgatgaaatgagagaagactacccgagggtgtaatcaaaggagcagtcctaatacgatgagccggtattctttgaatgaatgaatacatggttaaaggcaggtgataaaggcgatatggttggccatgccaaagcactgagagcctaggagcagcgtggccagagtctccgggagtcggcacctgcctctcctcgttgtctaggcctgactgtccctggccttgcacggccgcgcagcggggcgaccggcagggggcgcgctgggatggccaggagctcggctctccccgctctgtccctgctctgcggcccgcctcgcccctgcaagtttaaattcctcttagcaagcccagcatcgcagccaataacgcatcagggggcggagccgtagaggcttgcgccccgcctcgctccgctattggaaggaaagcagccaatgggagagccgaggcggggaggtgcggccaatggcgcgggcctgtttgattcaaaggttgcctataaagcgggactgcacgccggtttttgtccgagggctgtcgagtccgagcgccgccatggctctgctgtccgagggcctggacgaggtgcccgccgcctgcctgtcgccgtgcgggccgcccaacccgaccgagctgttcagcgagtcacggcgcctggctctggaggagctggtggcgggcggccccgaagccttcgcggccttcctgcgacgcgagcgcctggctcgtttcctgaaccccgatgaggtgcacgccattctgcgcgcggcggagaggccgggagaggagggcgcggcggcggcggcggcggccgaggactcgttcggctcctcgcacgactgctcttcgggcacctacttccccgagcagtcggacctggagccaccgctgttggagcttggctggcccgccttctaccagggcgcctaccgcggcgccacgcgtgtcgagacgcacttccagccccgcggcgctggcgaaggtggcccctacggctgcaaggacgctctgcgccagcagctccgctcggcgcgagaggtgagcggccctccagggccctgggtcgcacgggagacccccttcaagaatgggaaattgaggcctgctgggagtacgggccggggccactacctcctctgcgccctaccggaagcgcgcgcgggctaggtggtcccagggtctccgactcacaccccactctgcgtgtctcccccggatcccccgggccgctcctcgtggcaggggatagtgggaaagcctcggttcccaaggatgcgaattgtgcccgggttccatctcctaacgttcatatccctgaaggagggaccagaagtactctgagttccaaatttcagttaaaatcaaacttggaaaattgcctatttccctgtctgtcagccaacgctagatcccactttcaggagc

SEQ ID NO: 106 - DNA, 6000 bp, Homo sapiens
ctgtagctgctcccacagaaaagtagtttacaagacagtgaagtacaatatgaaactgaagatgtttagagaggaaacagtgatttaaagagtgctctgtagaattaaaaccagttagcccggcacattggggaacacctctggtcccagttacttaggaggctaagatgggaggatcacttaaacctcggagtttgaggccaccccgggaacacaatgaaaccttgtctcaagaaacaaaaccaaataccccaagtaggccgggtgtggtggctcaagcctgtaatcctagcactttacgaggctgaggcagacagatcacttgaggtcaggagtttgtgaacagccttgccaacatgggtaaaccctgtctctaaaaaaaaaaaaaaaaaaaaaagccaggtatggtgacacacacttgtaatcccagctaccccggatgctgaggcatgagaatcccttaaacccaggaggtggaggttgcagtgagctgagatcatgccactgcattccagcctgggagacagaaccagatttggtctcaaaaaaaaaaaaattggttaatggcattaaaagtcaactaataaaattagttaaaactatggactttaataaatgttatctgttttagcaatttttttttttgagacggaatttcactcttgttgcccaggctggagtgcaatggcgcgatatcagctcactgcaacctctgcctccagagttcaagtgattctcctgcctcttcctctggctccggagcagctaggattacaggcgcccaccactacgcctggctaatttttttgtattctttgtagagatggggtttcaccatgttggccaggctggcctcaaactcctgacctccagtgatctgcccgccttggcctcccaaagtgctaggattacaggtgtgcaccaccgcgcccggactgttttagcaaatttgacaaaatgtgggtaatttatccatataatagaaaatgcctaatattcattaattgaaaattagaaattacattaaaatattcggtactgttttttaaactattctacttttacatatttgggaagattattttctttaacgattctgttttatatattttattaattgtgttatctgtttcctgaaattaatatatgctagaaggaaaattacctttataaatgtcagcatcttaaaagtcatgtcaatatgcagattttgataacaatcggtatagataaactaattctaaagttaggaatggggccaggcgcggtggctcagacctgtaatcccagcactttgggaggccgaggtgggcggatcacttgaggttaggagttcgagaccagcctggccaacatggcaaaaccctgtctctattaaaaatgcaaaaattagctgggtgcggtggcgggtgcctgtaatcccggccactcaggaagctgaggcaggagcatggcttgaacccgggaagcagaggttgcagtgagccaagatgagccactgcactctagtctgggtgacaaagtaagactctgtctcaaaaataaataaataaataaagtcaggaataggtcatgccatgctttattatatccgtgatgctttattatatctgtgactttgaaaattaacattattttactaaccatactcaacaatgctttttaaaaagggatttatgacatataattcttttggaaattaaaatgcatggtataattctatggttggtcagattacacttcaggtgtaaatgaattaccttaaaaatgtatttcttaggtttatgttttatggacttaataaatattttattacaattttttttttttttagacagaatctcactccgtcacccaggctggagtgcagtggcacgatctcggctcactgcaacctccacctcctgggttcaagtgattctcctgcctcagcctcccgagtagccgggaatacagacgcatgccaccgctcctggctaatttctgtatttttagtagagccgtggtttcaccatattggccaggctgatctcgaactcctgacattgtgatctgccctccttggcctcccaaagtgctgggattacaggcgtaagccaccgcacccagcagaaaaaaatcttaaacttacaaaaacatagagagaaatatagcaaatgcttgtattagttttctatggctgctgtaacaaattactaccactttggtgacctaaaacaacccaaatttactaccgtacaagtcctgtaggtcaggagcccacacggggctcactgggctaaaactcaggtgatggcaggacacctgagcatctgcaggatcattcattccttgccttttccaccttgagaggccacctgtggcattcctgggcttgtggccccttcctccatctccggagtcagcaccagcggccacatccttgtcaggttgaatctctctgaacttccttccagtgttacgtctctttccaattctcatttgcaggtaaaggttctcggaaggacccaatgagactgggctcactgggataatccaggatcatctcccatctcaaggttcttcatcgcatacttgcaaagccccttttgccatgtcaggtaacttgttcacaggtttgaagattagaatgtgggcatgtttggggggcataattaggcctagcacaatgcccatgtacccatctccttgcttaaacattaaacactttgccaatattgtttctcctatctctcactttgttctctaaaaaactccaggaatttgttattaaattttattaaagcaaatcccagaaataatataatttgcctgtaaatatgttaatatgtttctctgaggcctttaaaaatcatagccactatggtattatcgtaataaaattacctgaagttatttaatgtcacctaacattcagtccatgtttaagtttcccaatttttttttttttttttgagatggagtctcactctgtcgcccaggctggagtgcagtggcgtgatctgggctcactgcaagctctgcctcccgggttcacaccattctcctgcctcaacctcccgagtagctgggactacaggcacctgccactacacccggctaatttttttttttttttttttttttttagtagagacggggtttcaccgtgttagccaggatggtcttgatctcctgacctcctgatctgcccgcctcggcctcccaaagtgctggcattacaggcaagaaccaccgcgcctggccgccaatgtttttaaaaatgccatttatttatgtaaaagtttgtttgtcttaatcatgacccaaacaaggtccacaaattgcatttggctaatgtgtctctcaaggtccccccaccctcttttttttaaagacatggggggtctagctgtgttgcccagcctggagtgcagtggctattcacagctgtgatcatagctcactacagccttgaactctggccttaagcaatcctcccacttcagcctctgaacatttatttttgaaaaaagaaattgggtcatttggtttgtagaatttcccacattctggatttggcagattacttcctggtggtgtaatctaatgggttcatttggcccctgtatttcctttagcctgtgattagtgttataagcttaactggttctagtttccctttctttgttagtcagagagaatactttagaggtgaggctgcaaacaatccacggtgccatattagtgtgtttatggaatcaggctgtcccagtttcgattatgtcaaagttgttcacctgatcatatctgaagatattacaatattcttaataataataaccatttaccgcatacttattgtataccaggcattttgctggctgtgtcctatataattcctcaaaccacatctccgtgtattaaccacactcatagatttgtgaaaatgtaccagaattgactggttggaaggctctatgtggattattactctgagcatgtttacttcttgaaatatgaaataatggctcctgcttttaatatacaggcttattttgaggattttttgaacggatgtgagagcacttagaaaactggaacgcgccgcgctacaccattaaaattagtaacatcagtgagaaaaaagcaagtgcataataaatattatagttatcctgattgtctcctttattcatcacacacttcctaagcacatctctggagggcactttccaaggctccgggggaggagaggaaagaggcgcagccaggcctggtgggtcccggaggggcagcgcggcgcgggaggggaacggggaggcacggcctggctgccaccgcgcgcggaacccgggagcggctccggggctgtcagctgcccgcctggctcctccaaggcctggagctcggacgcgggctctgggggcttctggggcgcggaagcgggctcgcggggagcagtggccgcccccggccgccgcggtggctgtgctcagaagccggccctggcgtcaggaggccgggcgcgcggcgcggggcgcgagttcccctgcccgcctgtgcgccccgcaacgggcctttcctgggccctaacgacagctcgcccgtgcttcgccctcgcagctctcctgtgtccccaaaatgcctttcccgcgtcccccgcccttcagcggtgactgcccaggggactctgtaacgcgacactcagactgccgagcctgccaggcacttcgcggagggcgctaggggccgggacgcggccgccgagcgtaggttccggcctttactccgagttgcgcacggagccccagctgcggttgtccgctctggggatcacaggccgcggagacccgggagccacccgccgggccccttcagacgacccgcttccgcaaaccggccgtgggactccggcgccgggcggacgaagcggctccgggaagactcggtcttccccgcccgcctgaggtcgccggggcggggcttcagtgacaggcccgcgcgctaccgcggaaacaggaagttggctgggtgcgcgccggctccggctgcagttcccgggtccctcggccaccgaagccaccctgccctggtgaaagggctcccgcaccgcccggtgctccccatctgcctggcgttgtgcgcagagctggaaagcatggctgttgtatgtattcttgcgcccgtgtgacaacatttaaacttctaaaaacggaacctccttccgtgttaggattgcaagttaacctaggaaaaacagcattctgcaaattatttgctggaaaatctcggtgacttaaggcccatgtattactttgcaggggtctctcactctagtttgctggtgtagattttttaaaaaatccatcttatcaaaaaataccgtttaaggtggaaaatttcaaatgcaagtcgcagttgatgagattgcaattaatatatttaagatagtgaattagagaaaaactacaggtcagtgcatattaagtatttttttcatattttggggggattagatttttaacgataactttgaagttaaaaattaaaagataggctgggtgccgttgcttaggcctgtaattccagcactctgggacgctgaagtgggaggatggcttgatcccagagatgcgagaccagcctgggcaacatagcaagtcccccgcccccaccataacaacaaaagtaccaaaaaaaaaaaaaaaaaaagccaggtgtagtggcacgcacctgaagtccctgctactcgagaagttgtgggggaaaggatcgcttcagcgcaggagtttggggctgcagcgagctgtgacgcagcctgcggttgacaaaaagtcaaaactctataaaatatttgaagggattaattctgagccaaatatgagtgaccatggctggtgacacagccatttggagaccctgagaacgcgtacgcaaggtggtcggggcccagtgtggttttatgcattttaggggagccatgagtcatcagtcaaatacatgtaagattaagatgta

SEQ ID NO: 107 - DNA, 6000 bp, Homo sapiens
atctgggtctaccggaatcgtcttggaggtttgcgccgccatggaagaaggctgactacgcaggctgccgtgtcgtgaggaagcccgaggctttgtggagagaaatgcatggaaacggtttcagtccccagccgagaccctaggcatcagggagcagaacatcaaaactgcggacttgggatacaaatgaatgatcactgttgttgcaaagcccttacgttttgagggtggtcttttcgtgaagcaatagagaaacggaacggggagacggacagtgagcagacaagcaataatacgaagcagaagggggaaaaacgtggaccaagggatagagaagagggcatggagagaaaaggctggggttgagggcttaacatattagacaagggggtcacggaaagcctccctgcttctctctgtttgctccaaactcttgcttctctttgcttgctcagcatcagcgcatagcgcatagaacccccaaaggccaccccacaatggcagcctcagccccagaatttacgtgtcctgttacaagtcctagggccacaacaaactctctggactcatttgattttcttctaatgttttatacacacacacacacacacacacacacacacacacacacacacatatatatatgtattttttttttttgagacggcgtctcactctgtcagcaggctggagagcggtggcgcaatctcggctcactgcaacctccgtctcccgggttcaagtgattctcccgcctcagcctcccaagtagctgggactacaggtgctcgccaccacgcctggctaatttttgtgttttcagtagagacgggggtttcaccatattggccaggatggtctccatctcctgacctcgtgatttgccctcctcggcctcccaaagtgctgggattacaggtgtgagccaccgcacccggcctctcatgtaaaataattaaaaaaaaaaaaattctgggccgggcgcggtggctgacgcctgtaatcccagcactttgggaggccaaggcgggcggataacctgaggtcaggagctcaagaccagcctggccaacatggtgaaaccccgtctctactaaaaaatacaaaaattagctgggcatgatggcgggttcctgtaatcccagctactccggaggctgaggcgggagaaaaacttgaacccaggaggcggaggttgtaatgagccgagatcgcgacattgcactccagcctggacgacagagtgagactccgtcacaaaaaacaaaaaacaaaacaagaaccaaaaaaaacacataaaaaacaaacaacaacaacaacaaacgaaacctctaatcacaggtcagttttactgtttctcaggtccagactcgttctgtgctgttggcagggtatcctgcagtggccactcctgtcttactaacagaccctgattttgtccacaggatcaacacacccagctaaaacagctcaacttcctcatcacacaacacagttctggccagttagacacacgtccccggaaagggcatctccaggagaataaaaaggccaagccactttttgaagaaagtctttgtccctaccccctttttctacctggaagtcagactcaggcctggagtgtagcggccgccttggtacctggaagcaacaatcatggccgggagaccttacacctggcatggtagagcagacggaggaggggccgcctggtgaatagcctggccaacagccccaaactgctaccccttaaattctgggtaggtgagaaaaataagtcctgtctaagctgctcattgttttagttacctgtagccaaagttaaatcctgcctaaaagggttctcccctcatttttatattacatgccattttttattttattttattttattttattttattttattttatttatttagagacagagtttcgctcttgttgcccagcctggaatgcaatggcgcgatcttggctcactacagcctctgcctcccaggttcaagtgattctcctgcctcagcctcccgagtagctgggattacacgcacccgccaccacgcccagctaattctttttttttttttgagccggagtctcgctctgtcgtccaggttggagtgcagtggcgcaatctcagctcactgcaagctccacctcccgggttcacgccatcctcctgcctcagcctcccgagtagctgggactacaggtgcccgccactgcgcctggctaattttttgtatttttagtagagacggggtttcaccgtgttagccaggacggtcttgatctcctgacctcgtgatccgcccgccttggcctcccaaggtgctgggatcacaggcgtgagccaccacgcccagccaaaaagttgttttaaaattttttcgagagataggatctcgcttagttgcccaggctggtcttgaactcctgggctcaagcaatcttcccactttggacccccacagtgctgggattacaggggtaagccaccacacccaacctcaatcttcttgtgatctgttatgttgacaaccaagacagctacttagtggttggttgatgggtggacagtgtatacagcatggacacactggacagaggcatgactcaatgttccaggtaggacggcaacagatttcatcacgctactcagaacagcacaacatttaagacataaattgtttctggagtttttcatttagtattttcagatttcaggtgactgctgtaacttgaagcaagaaaagtgaaactacagaaaagggaggaccactggacggctgctttcattctacgcccactttttagagtgcattcctacaataagcaccctaataatgtaaaccaggggccaagggatgcaccttccactctacttccttccccagaaaagaccaccttggtaaatacagaatggcaaacggttaagtgaaacactgtatagcttctggccctatacttagtatttcttaacatttacacagcattttcacatttccaaagcagagtaccaacatttattaatcctcacaacacccctgtgaggtaggtcagtatgtcctttagagtcgagaactgaggcagaggtcaagcaaacctgccctgggccacagagcagcagatgaagggcctagacctggatccagaagctagggctctcggtccagcattcatccactggtggacatcacatgggcttatttttaccagcgaaggttacgtgaaggacaaaacgcactcagccagcaacggaaactcaacagttcaaacagcactggggaacatgtcagttaaagagacgaaacgctgaccagctcatgaatgaggcaagacaacatgcggctgaggaagtgtggaatcatcacgactggggattagaccaagaacgggcgctcaggagggttcaggaaaatgtaaacaaactaggaacccatccaaggggtgacaggcccaaatgcctacggtctccaaatggtagaaaaattagaaaaagatagtggaaaaatccaaccacgcaaccttaactttaaactaggaatgacaataatgtgtctaatgttcattcacactagaaaggccgataatgtttgtaatataactactggcgatagtatcctatttgtatgccaactttcatctcaagtattctgcttttctttccccacagacaaacaagtgttgttctttacagcagacctctttccctctacataccaatctatccactcgcataactactaagtggctcaatggcctatgtctcatgcttaattggctgagctaggcgcggaatccgggaaaccacaacagactgtactctgctcctgtatttcaggaataactgtcactaacctgcttctgtccgattccaccttctatgaagtacacacagaggagcagttcattcttttgtaaagggattggtggactttgttcgagatgccatttcaaaagaaatgagaaaaaagaaaaactaagacctgcactgtaaagcataatacaggagtagatttattacagctactccacattttagagagtgccacagtgtctcggtaggaggcaggaacccgagttcctggttcagaaacagggttagaaacagtctcccgatggagctcaagtggctgtcatctgcctgttctcctcaggtatcgagtgggatcagttgagggctgagcaaaagtggggactgggaagatgacgagaaaagataacttttcgtagattgttgaggccgcagtcagactgaggagtgaacagtgtgaaggagaggttgagagcctcatggtgtggaaggcataagggttagaggcgaggttggagggatgtgggtgctggtgtctgaggacttattggatttcgggctgtgtgtccctcagcgtctagattcctgcttcgtaggtgatgagacgctgcatgtagcatgttcacctcagagactgtcacttatgagggtgcccatcattattatttttggtgacaaggtagctgctattttcctgtaagcagaagctgcggaagaaaatggtgggattggccgggagcggtggctcacgcctgtaatcccagcattttggaaggtcgaggtgggcggatcacctgaggtccggagttcgagaccagcctcaacatggagaaacccccgtctctactaaaaatacaaaattagccgggcgtggtggtgtatgcctgtaatcccagctactcgggaggctgcggtaggagaattgcttgaacctgggaggcggaggttgcggtgagccgagatcgcgccattgcactccagcctgggcaacaagagcgaaactccgtctccaaaaaacaaaacaaaacaaaaatggtgggattaagacccgcccccgtcccgtccccgccccttttcgctcctgctccgccccttccccgccttctacctgcctccctcggtgctgtcggtctgcgcgggcgcgcaagggggactgggacgttcaggcggaagtggcgtcaggggcgctttagggactggacttgcagtgtaaacagagacgctgcaaattgcttgtggacggtgtaggccgctgcaggccaccatgaaccggcttccggatgactacgacccctacgcggttgaagagcctagcgacgaggagccggctttgagcaggtgggctcccgccccaccctggcccccgaggatttgggtcgaggcctggctttggtcgcctccattcgttgcgcctgccgagcctacgcagaccctagcggctcgggagcctgtcgtgcctgttacttgtgcgaagccaaagggctttcctgatggggtcgcgcagtcccggggggaggcggtgccgatgtcgcctgtaggaagagggatattccggaatcacgggggaccgcgtgtaaatcttcaaaagcaatgagatcgaaacctgtctctacaccttagtagcagagtgacggaaggcaagtcagttatcctcgattactcacctgtaaaattgaactataataacataattgtataacctatataacatagtataacacactatgtttgttgtgaggctcacaggacttaatgtgaagtgtccatcttgaagactaaactgccataaacagaaataagggaatattgaacagccttttttatttttattttttgacagggactgttgtatgctcgctctgagctacagagataaatcataaggtccttgtcttccagaggcttatagtataataagggtaataagataaagtatatatttcttggcagagcattgtagagaatattgacctgagataggcacagaagaaggttcgtgggatttccagaagggtgggctttattctaccagggaaacttgaagctgttttgccgagatatttccacacaaatttagttatttcttaagctgtcagcagatcctattcttaaactttaaaacattcattctgcctaaagaagctttctgtaaagccatgctttcattaacaactttggctg

SEQ ID NO: 108 - DNA, 6000 bp, Homo sapiens
aaggtgtcagtgttggggatggagagtcatagtggtgataagcctggtaagtaacctcaccaggacgtgccaaagacaggtcagcgagggaagggactgtggaagcaaggtaaggggaggtgaagttgtagtggaatttgggaggtgcttactgatcttcttgcaggccctacaaatgttattcaaacctctgggcaaatgtattagtcacttgaccctccacgaactcctccaaggacttcagggattaacgctgttgccacctggctcctcagagcggccagtcaccgtggtgcttcagaatcaggtaacatgtctaggaggcttttttccatagatggctttcaggttggtatcactgataaggggtaagttgggggacagtctcatctctacacaaatcttatcctctgcagtgcttctctatttctagtaagcacatgatcacctggaagcttattaaacccagctccttggtcccactcagtcattcagtaggtctggggtggggcccatgcacctgctctgcttttctaataagctccctgattgctgctgatgtgagtctctaaagcaggtctccaaactcttgtatacccctttcagtaaaaaaatattctaaaccacactacccatgtgtttataaatcaaatacatgtaacactagtaataataggtacataataaatattttctttttttattttttagatagtctcgctctgtcacccaggctggagtacagtggcacgatcttggctcactgcaagctctgcctcctgggttcacgccattctcctgcctcagcctcccaagtagctgggattacaagtgttcgccaacacacccagctaatttttgtatttttagtagagacatggtttcaccatgttggccaggctggtcttgaactcctaactttaagtgattcgcctgcctcggcctcccaaagtgctggaattacaggcatgagccactgcgcccagccaataggtatataataaaagacagaaaattttaaagaatgagactctagatgtgaaaattttgatgctctcttctaatatcccagtgggttatctcatgtatgccatactgaaggtctttgcttaaagaagtgcctcttaaagtggggtccacagactacctgcctcagattcctggatgcattcccgatctcctactcctaggagttaagcctagaagtatgcatttaatcagctctccaagagtgtcttttggaaaagttcagagcagtgattcctatggaaagggttagagagttctttggctcaccagtgtaaaacctgacagcacttgtggatattttgagctctatctctaaatgtgaacctgtcctttagttgggaagataagagtcaggaaagcaccaaatgccgagtgtgaactcattttgctctggaatatatatatgtcccttgcagtttggaatatctttgctctatgccctgctgagccatggggagcaactggtatcgctgcattcttccctagaggaacccaacagtgaccatacagcttggtaagatcataaaggccttgtaaatactatctagtaccctcgggatgtgcagactgagccaggtgaagtatttcctgaggcattttcaagtactgaggaagaggttggatagagaaagtagtagcagtgttgtagctgttctgctttttttctatagtgccctagagtttcggtttcttctaggaggcagtataacatagtacctaaggggacaagctttagattttaaaaagacctacgtttgaattctggctgtatcacttactagcaatataactttagggcaagttctttcacttctcacttctcttagtttgtttctttatctacaaactagggatgatggtattaacccctcatagttcttaagattaaataggaagggaaatgtgtaaagcactaagcattgcttggcacgtaccaaacatgcaaatgttacctctgaattgctacctgggggtgggggacaatggtagtagtaacggaaagataataagaaaccttggccctgagtctgtttcttaagcaaatctatttgcttatatttatatttatgctctctaggacagacatggtggttctgattgcctgggagatagcccaaatgcctacagcctctctggcagaacccctagctttccccagcaacctacttcccctgttctgtcaccacgtggacaaacaattggttcagcagctggaggccaggatggagtaagtaatggcagaaacaaggtcaaagccccttgttcaagcccaatctatgttctgttacttgcttcactacttccttcttctaaattatgagcatgaaggatcatgtgtttttagaagtggttctacacactgacatttactgagtaaccattcttgactaagtcttcagccaaccttttattccaggtgctttggtcatttatagtgctaacctatttgagggcaagaattaatttaagaacctgaattattcattcaagaaatacttgagggacaactattctaggatataagcatgaataacatggtcatctctgtcctcagaattactgctagaaagagtcagatactaattaaatcatataaatacttgcaaagtagaattgtgcttgcagttaatatctgttctctttataggtttgcctggatttactgatctgtttgttctggaatacgtgtatgtgggaagttgaatcatcagacactagctacatagactatgtttacagggatccagagagtctgaagacatttcttatgcctttatatattggagaacccttccccattttcatatcctttcttcaaaaatctaaatgatgtgcctaaaaataagacatggcataataaggtataattaaagagataatagaatgatgtgttggaacttgcttgtaagttaaaacctgtaatgaaggctatcctatgtgtgagtgctccaggaatgtcctttttctttttttttttttttttttttttgagacagggtcttactctgtcacccatgtgggagtgcagtgccaccatcatggcttactgcagcattgacctccaggctcaagtgatcctcccacctcagtcttctgagtagcttggattataggcatgtgacaccacacccagctaatattaaaaaaaaattttttttggccaggtgcagtggctcatgcctgtaatcccagcactctgggaggccgaggtgggcagatcacctgagggtcgggagtttgagaacagcctgaccaacgtgaagaaaccgcgtctctactaaaaatacaaaatcagccaggcatggtggcacacgcctgtaatcccagctactcggaggctgaggcaggggaatcgcttgaacccaggaggcagaggttagaggttgcagtgagccaagactgtgccattgcactccagcctggacaacaagagcaaaactctcaaaaaaaattttttttgattttttttgtagagacaagggtctccctatgttggcaagggtgggctccagtgatcctcccaacttggcctcccaaagtgctgggatttacaggcatgagaagactgtcctgattataagggacaaggctttgttgtagctaacacaagtgtaaccttagaaattgctttaacgttgccattttttacagaaagaacacagccccagctaagcttagaaggttgaatatatctcccttgtgatagaaaacgtttggtttcagctgggcacggtggctcacgtctgtaatcttagcacttccaggctgggacaggtaaatcaccggaggtcaggaattcgaaaccagcctggccaacatggtgaaaccccgtctctactaaaatacaaaaatttagctgggtgtggcgtgcgcctgtaatcccagctactgggaaggctgaggcagaattgcttgagcccaggaggcggaggttgcagtgagccgagatcccgccactgcactccagcctgagtgacaaagcgagactccatctcaaaagaaaaaaaaagtttgcttttattttgacaaataaggtcatgcattgatcaacaaatgcgggagtacctttcatgaaacatgcactgttttaggtactagccaggacagtggtgagcaacaaagtccttgctcttttgaagtttacattcttattggacaggaactggcagaaaatatcaagtagtgataaatactatgattaaaaacaaaactaggtgagagactgcagtagaagggaccttaggttgaatggcttggggaggcctgtcaatagaggttacatttatgctgaaatgttctgaatgtggaagatgtgttaagaaggtacagttgtcttttaggagactttaccaaaatacctattcaacccctcttctcacctcaaactctttgctcctctccttctcttgatcttggatcatacttccctgagaaaacagacaggagctctctaccatctccaccccttacttaccccgtctctctgactgttacaatggatattatttgacttcaaatttcgggtcaacacccttactatggatccacactgtaagacggtccatgctaccaaggaaatggcaccaccccagagcctgtaagcgaacagcacaataagaaaagcgaagaaaagaggcaggaactgggttccaagggagctggaggcagctggaccaagaaggcaaagagcaatgccacagagcgagaacggctgcaacggcctgctacgctaagctaggccttcaagcatgccagagcagttaagcagagtgggactggcgtcagggcagatgtggctttgctagagaggctggtactgccccccacaggaaacgaatggaatcgaccggagacagccgagaggtctccgcgggagtcacgaggccgagcgggagccgctacgtacaccgcgcatgcccacgacgcagtcaggttccggcgaaagtgaccggaagtaaccgccgggccaagatggctgcagaggaaggggtcgcgagtgctgcttccgccggcggtagctggggcaccgcggccatggggcgggttctaccgatgctgttggtgccagtccccgccgaggcgatggggcagctcggctcccgggcgcagctgcgcacacagccggaggctctggggagcctgacggctgcgggcagcctccaagtgctttctttgacgcctggcagccggggcgggggtcgctgctgcctggagggccccttctggcagtaagtgctgagggagagttgggccgttgggggagtccagagcctaggctcggctgactgagccccaagggctcacgccgaggcctccctgcagccatagaggtggcgggagaagggtgccagctgcaggaaacgccccagaggcgagcgtggtttcctcacagaacctttcccccgacctgaaacgctcgcctcgttgcattctggcagcccagctctcctgttccgggtgggcggagacggcacccagctccattgccacctgcggcgaacccggaacgggtctcagctgaggcgctgattctttcattattcaacacaggttgattaactgtcacagggtcgagtcccatgcccatttctttcagttaaagatgccagctgaggatcatctctaatttgaatcatcctgatacttttttcatgtccttgaagtgaatagcgttttctttcacatgtagtcctcttcttcaaggacagagtccagtttgtcccttcatttattcagcaaatattgtgtgcttgctgttacataggagcagtgcctaaaaagttgagtaagacacttctttcttgcgaggcgcgcatgtttggggaagacaaacatgattacaataatgcattactttgtacttccgtaactcttggttcagtacttaagagtttacatcataaagtttgggaacgccctcttagtgttttgagtgggctgctgcttttttttttttttttttttttttaa

SEQ ID NO: 109 - DNA, 6000 bp, Homo sapiens
gttgcagtgagccaagatcgggccacctcactccaacttgggtgacagagctagactccatctcaaaaaaaaaaaaaaaagaatagcattactgattcccaaatagatgatgctgaagttgtttatacaattgacattcagaaatatattccatgctatcagttttttagtttttataattcttcaggtgaagtaaataagcaggcactgaggaaaatattatcaaattcacaaaaaatgtggtaggttgttacaaattccatcgtcattcagatcagatcatgacatttagagagaggctgcttcacaaaaacttgcaggagcatttttcaaaccaagacctggtttttctgctatgaacaccaagtataataacagaaagccgctctactcatcgactggaacatgccttatataaacctcgaaaaggactttttcacagggtaccttcagtggttgccaatctgggcatgtctgaacaactaggttataaaactgtatcaggttcctgtatgtccactggttttagccgagcagtacaaacacacagctctaaattttttgaagaagatggatccttaaaggaggtacataagataaatgaaatgtatgcttcattgtaagagaaattaaagagtatatgcaaaaaagtggaagacagtgaacaagcagtagataaactagtaaaggatgtaaacagattaaaacgagaaattgaaaaaaggagatgagcccagattccagcagaacgagagaagagcatccaaaaaagaccctcaggagaacatttttctttgtcaaacattatggaccttttttccagattctgaattcttcatgcatgtgttatgtctttaaaaaaacagacatgtttctaaaggtagctctaacaaccaccaccatctcgatgtagtagacaatctgaccttaatggtagaaaacactgacattcctgaagctagtccagctagtacaccacaaatggttaagcataaaaccttagacttagctgacagatggcagttcaagagatgacggcggacggatcacgaggtcaggagatcgagaccatcctggctaacacagtgaaaccccatctctaatacaaaaaaattggctgggcgcggtggctcacgactataatcccagcactttgggaggccaaggtgggcggatcaggaggtcaggagacagagaccatcctggctaacatggtgaaaccctgtctctattaaaatacaaaaaattagcccggcgtggtggcaggtgcctgtagtcccagctgcttgggaggctgaggcaggagaatggtgtgaacccagaaggcggagcttgcagtgagctgagatcctgccactgcactccagcctgggctacagaggaatacttcgactcaggagaaaaaaaaaaaaaaaaaagagtgttcacggctgttagacacacaagacaaaccatctaaaacagatactgatagtagtaaccaataaaaaagcatccaaaatgagcagcccagaaacagatgaagagattgaaaagatgaaggttttggtgaatattcacggtcacctacattttgatccttttaaccttaaaaggagatttttttaatttggctgatgggtaaagtcaaacatttccattgtttttactaggttgagctacttgcagtaatacaggtaagttcatttgtttttactatattcacctctttgcagtaatccacagataagtcttagtgcatttattttacaaagtactttttcaaacatcagatccttttatttccaaaccttttttcgcctttcaataagttgttgagggaaaggcttacacacattctttagaattggaaaagtgaggccaggcacagtggctcacagctgtaatcccagcacttagggaagacaaggcaggaatgattgaggccaggagttagagaccagcctgggcaacacagtgagacccatctctattaaaaaaaaaaaaaaagtattagaaaagctagaatagccttattttcacaatgtggaaagaaatttatatgaaatttatctgagtcattaaaattatccttaggtgataattttttagaagtacattacagctagtgttgccagataaaatgctggatctcacgcagtacctttgcaaaacatgatctaaaatttaaatttgtcctacatttgtacttgctaaatctggcagccttaattattacacaactataacgcaacacaaacaataatctctcccctagtttagagtcctttgcacgaaatttagcaaatccttaattttgagtacagtacaagcctggtaatccagtgtgtttgggataggctggtggaactcagaactgatacatatatacatacatgtctatcacattcactgtctattaggtgtaaatcatctttttatgtaaaagacactactggtttgaggatagagttgtctaggaatgttttgtcctgctgtgacagcatcactatgcatcccagtgtaacattcctacaaagggaagatctcttaaccaggcatacttacatttgctagttagaaaaccattctgagcagttttaactccattcagttgaatggtgtactacattgtatgagctatttgtggaccagatataaatgactatcacccagaaccactttcattcaacatatgtaaaatgtgatgagtgttaacattttaaataagcgatctgcttaatgaacactgattggtatgaaggggaagtgtcattctttacctcactcctgaaacacttttctatccaaaggttggtttgagtcagtattggcgtcatacaaccacttactataaaataagtttactggtggtaatgtgatggaatttattccggatatctgatgttataaactttagggtccctgaaatatgcaggatccttgtatgtaactggcataaaccctgtaaagagataattaaagttcttgacaaagcataatgagcaaaatttcagctagctcaatacagttgttgaggtgctctttcttacccattgtttgagctctcttaattgcttttgtgatttgtttcttcccacaaagacctgtaaaataaaaagcttccttattcataaaaaagtcaatatttaaagttaaaaaaatgtttatttctcaaactgaaacattatttctctatctcttgaccttttagtacacgtttttgtatattcggttttactaaatcaagtcaaacctgttccaggtaatgtgatgttatacatgataggtttcatttagggtggggtggctaagttgcaacccttttaaatcaaggctccacctcaggaacctaggaatgttaggtaggagatgaggaagtccacagcttgccaagaacttcagctattccataaacaatctgattacatatcccgactcttgcacacgaaacaggttatccaagtcttaaacttgatgcttttgtgcagtatgaaccaccctttccgtggacataatcatgcatttgcacatttaaataccattttctatgaacagatcagtatgccaaaaaccactgcaaagtctcctacacacaccttgccttgactttctgtacatttctagtattaaagaatggtgtaggcaaaataaagatatatgtgtaagaaaaaaaagacatgcatgaaatggtttaattttagggaactagatttatattttatctgaaaagagtattaataatatataatagacctttgaaagttagacgcatagttctgcgaaagtggtgcctaagaatagtatgtcaattgacaaattttttccataaagaatctgattttgctagactacctaatcaccaattaacatcctccagtagggaaaaaaatatgcttggtgacatgtttaaatcgctctcaagagtactgaagatgaatgatcttccaatcaagtagctatttgatttagtaataacaactaaaagatgggaatcctcttcttcgcacactcattttaagctccaaggtaattccatagattcaacatttaacacgtatattcaatattacacattttttttccggagtgaaatggctctgaatgccttacagaatttgccctgctctccttaactaaatactttgtctattaatacttctttcttcttttccccttgttctttctgtgccagacccacacacgtctgctgtaattgaacatgccaggcacattctccatttaaagccttttaacagctgctgtctctgcctagaatactcttacttgggcacacacaaaactagcttcctggtctccctcaactgtctgctcaaacttcacctccttaatcatgtctatctgtccctcttatttaaaattgtaactctaccacttctgatctccacacttgatgcccctggcctcccttttcctccactgcatttgtcactaacatcccgtataattttcttaggtattatgtttattgcccatttctcaccgagaacatacgcctcagggtggaagaagtttgtctttttgttgttgttcactgcttatccccagtgtcaggagacatgcttggcacattgtaggtccgcagtaaatattttttgaattaataaagaatatttctaccatctgctagcttactgttcatgcaggagctcaaatgtgctttaagcatgtgatatgtttcaaaagtcaaacttcatccttagggagaacactgtcatcttctcctcctttaaaaaaaaaaaataggaaaaaaagcaaaacaaaacatcaccttctcatttccccacctccaacaaaaagagtgttgagttttctaaagaaataatacaaatggataaaactgcaatttgttgtcctttctctcacatgcaaaaagaaaagaaaaaatactgccgagatttcggcagcgtgctgagcttcatcaaagcattaaaacaatgctgcttgagacgtcagaggctcatccaggaagtgcaacccagagggcaggatttcctgctggactttgaaatccaacccggtcacctacccgcgcgactgtgtccacggatggcacgaaagccaagcgagtccccctgccgagctactcgcgtccgcctcctcccaagctgagctctgctccgcccacctgagtccttcgccagttaggaggaaacacagccgcttaatgaactgctgcatcgggctgggagagaaagctcgcgggtcccaccgggcctcctacccaagtctcagcgcgcttttcaccgaggcctcaattctgggatttggcagctttgctgtgaaagcccaagtgggtaaccaacagcttggaggacccgagtggattcgattctctctcactcctcggccactcaactgctccttgtccctgactccgcggtggggatgaataactcaactcatttcgggccgcttttctcagagggcaaagatgggtcagggtgggatgttacattagtgttgagactctttggatccgtttcgtgggtaccgaggacgcctgggtacgcgggacaggctgcacccgcctgctagaggcgccccatcgaggcgccacgggtgaagctcccggccccacctacggggcggggctccggctcggtccgactattgcccgcggtgggggagggggatggatcacgccacgcgccaaaggcgatcgcgactctccttctgcaggtagcctggaaggctctctctctttctctacgccacccttttcgtggcactgaaaagccccgtcctctcctcccagtcccgcctcctccgagcgttccccctactgcctggaatggtgcggtcccaggtcgcgggtcacgcggcggagggggcgtggcctgcccccggcccagccggctcttctttgcctctgctggagtccggggagtggcgttggctgctagagcgatgccgggccggagttgcgtcgccttagtcctcctggctgccgccgtcagctgtgccgtcgcgcagcacgcgccgccggtgagtgagctt

SEQ ID NO: 110 - DNA, 6000 bp, Homo sapiens
cacgtccagctgactttgtttaccattccactgtgaaaatacaggcaagcagaagaaaactttcacgagcttcaactaactctacctacctcccaacattcgttcctattgttccagttatgaaagttatgtaaggaactatcccaagacttatggcctaaaagactgaccatttatttggctcaaaaaccagcaatttgggcagggcatggcagggatagctttgatctgctctacttactattgctggaatggcttgaaggttagtgactggaatcccttggaggcacattcacccacatgttcaaggttgatgctggctgtcagctgggatcatacatgcctctccaagtggtctgggcttccttacaacatggcatctgggttcttgggtgagagttctggagcaagataggcaaacaaaagctgtctcaacttccatgacataggtactctagccacaaagcatcacttctacctcattctattagttaaggggctgcccatattcaagagaaggggaattagacttcacctgatatcagtggcaaggttctagaagaggatgtgggactggaaatatagctgcatctacttttgaaaaatacattctgtattctctcctgtttctttaaactgtgcattttggccactaagaacaacataaaaccttaaaaactacatctagagaagtctccacacctgaggccggagttcaagaccagcctgggcaacatagcaagacatcatctctacaaaacaatttttttttaaattagctgggcatggttgtgcttgcctgtggtcctagctactcaggaggctgaggagggaggatcacttgagcccaggagttctaggttacagtgagctatgatcacactactgcactctagcctgggtgacagagcaagaccctacctcgagaagaaaaacaagaagtttctaatgtctatgctttggaattccagtgttgctaaaactttttttaaaaaattgtgcttttataatttttcattatggctccttgaaacaatttgagctggtcccaacttttgctgacaacaactctgaaccaggtattacaatgagattcctgaatgtttcaagaagaaaaaaatgttctgtcaaaagattgacaagattttggaatattcaaaggggtttatggcctttaaataccataagtctaaatgaaaataaaaatctgagttttatttatttaagtaataaacctttatacgttctaagtgttttcatatacactggctcatttaatcctcacaattacgctgaggggtactgtattagtctgttctcacgctgctcataaagcatacccaagactgggtaatttataaagaaaaagagatttaatggaatcacagttccacttggctagggaggcctcacaatcatggcagaaggcaaggaggaacaaagtcacagcttacatggcagcaggcaagacagaaagagcatgtgcaggaaaactcccctttataaaaccatcagatctcgtgagacttattcactgtcatgagaacagcatgggaaaggcccatcctcacgattcaattacctctcactgggtccctccaacaacgggggaattatgggaactacaatttgagatttgggtggggacacagccaaaccatatcaggtaggtacaatttatctagaggaaaatgaggcacagtgagataagtaacctgtccgagggctcacaacttgggggtggatctgagcatccaactcaagtggtcccacaccaaattctgttcccctaacaccggctgcgctgagagaggatgtttaagatcatctttccctgctttgcttactgttccctggggaccctcactcctaaccatgtcacacaggtagagatacctacagctttaacaagctggttgtttttcatcaacctcaaactgccttagtacatctaacctcacatacaagacaactctaggaagtgtgtttttggctctctgctcaccatctgaacttgctagtctatttgcagacagctagtaagcccggtacagtttgatgcagtgactttgaaagggagaaaatggcaactgcaaaagctgagggctgccttgttccttcagtccttccttggcctttgtgctacccagatgtctgttggcaaattcctctgtttgacgatcagcagctgtttgacaaagatcaatgcattagtcaatggtgcccacactgactactcagttcccaaactaatggtttgtttatgaacgggttaactgatggctggcttgttgagtgtggcaaagcgccaatccttcttctgtaatatgtgcagtagagggtgtggggcctcttgttggcaaccaccaccatgaagtcagagaccactgcccccacctcctttctgaaaattacaggataggggaggcagaaagaaagagggaagatggttccgtttcttaaaataattttactacttaaattccctagtctctatgtttatcatgtatttaaatcaatttccattgactggagaccagtatgtaatgtaataagctcaaaagacatgtgtgttttcttctgaaatttcaaacatagatgcactttactgaaataaagtctccacaggattgtttcttggggctgttgttgttgtctatgcagaatggtcttgtataaagagatgcataacttagtttactgaagctgaattttccatggaaattatccagtgctttcccaattctcaggcgctttatctgacagtctttcttcctctagataatggctggcagcagcccacagagtggaggttatatggtgcacttctgaaaaagtcttgaatggagccattgttcccctgagatggtctgtgtgtttcactgaacagagagcagggtgtaaaaaaggcaccttgtgtgcaactgttggcgaggttggggagtgaattaaaatctccagaaagtctgggcagtgctgttcagaggagcaatgaacactctggaagtactgttagctcagacattccaatgtggtgaggcagcctcggggacacgacttccctccaatctcgtttagagagggagccatggggcgagcaaaggacactgatctggacctgctctctttgcaaagatttgaggaaggcgcccctttctagggatggggccacagtgattatcacacttggataactttcctgctcaacggacctagatttgccttgcttactaatcatgcaatgactcatttggaggattcaatgttaactgcttgtgcatctaccagtttgtagctatctattcccatgtgccaaattaaaaaaaaaaagtctttgggggtgccaggtgatggatgaagtttgatattatttgatcattaaatgaattataaaaccataatataatactgtatattaaataaatagcctaccttgtttattgtcagtgatgctacctctttcctcagccctttatttacttgttcaggataacatagcctcagggattgagtaaattaccacttctcactgtcctagtgctaaaatgccaagatcttaaggaacaaagaatttctttagagccctctgcagagacctttctgaaatcagctctccagggaggcaatcatgttagttttcattaaagtcctagtggtgagaaaacagcaagacagtttaaggaccagactggcagatttttcttaacagcaggattctttgggcctcctgtgctttcttgctccaacctctcctgtgttctggagcctccaagaaggagagatcacttttaagagggacccgaaagaaagggtcaaacatgagcaggaggaaagtgtgtgggaggagatgctccaggtagaaggctcagcttaagttcaggtacagagctagagtgggagagacattctgttgggtgatccttattagccagggcatgctgggttacacagccatggagagttagtttggagggcaatagggagccagtgaagttttctgcatagattaaagttgtaaaaaaggaagaataatacagcggtggtttgaaggattgatttggtccaagggagaggacagtgggaggcgatatgggccacaggaatgggtcctgatcggatgtaggagaagaggtcaggcctagggaacggtcttccattagaacaggtagagggaggaggcacaggtttaggcgaaagggaggaggatgatgatttgatttttttttccaggtccttggctctcctaagactcataaaagccgctccagcggctaaggaagttctgtgcaaagcctgtagtttctagttgtgaagatcttcaggtttgcttgagcaatgaaagagtactggatttggagtccgcagtcctggatggccaccattaccagcaaaaggagtatttccggagcctggcacaacgctgggcacattgatggggctcaatgaatatgtattaaatgaacgagtgacagaacagattcgagacttggtgctgccatctactacagagaccttgatcgtgtcctttatctgccgtgaacctcagtttccatatctgtcaaccaggggtggttccctggggtagtgtgagagtaaattcccgccgcctgaggtgtgcagagttcccgcccttcccggagccgggcgccccaggagcgctctctctggctcccgccagaaaggatggctcctaggggtcagggccaggggtctgggaaggggtcgcgccgccagcagccagctccgggggaggcggccgggtcctcgctccgcgcccgccttccccgcgcggcaggagccgggggcgggcccggcacaggccgctcccccgcccggccgcccgcggtggcgctagcggcctctcacccggggcgggcgagttctgggaaagcccggcccagggcgggggccccgctgccgcccgcgcagccgccgctgtccgggcagcgcgcacatctcggcgggagcggactgtgaacggcgcgggtccacacggtaacgctgggcaacgtgggcaacgcggcgggcggcgggctcgcgcggcgggaggggcagcggcggcgcgcccgggctctacctcccgggctctgcctcccgggctctgcctctcgggcacttgcctggctcctgcgcgttcctgggcatcggctctgcagctgacacacagtagcggggacacccgacgccgctagcgacaggcgcgcggacggctggtcccagagggacgctgcgcttggggacgccggcgagactcgccaggagccaagaggtgaggaagcgactctgtagctcggttcctgaggactggagaaagggaaggatgggctggttctctcccaaggcagtcgacccgcctaagggagcagcccgactccgcgtacctggcggaaaagtgtcctcgcgctcccgggggacccgaggcgggcggtcctccagggcatgcaggccgccctcgcaggggctaaaggacaccctgccagtgccttcactccagacgcctgcctcaggtcgccccttcgtgttgtgaatacggtgtggaggtggccagtgcaaagaaaaacgtaagctctttttgtggcggtacttagcagcggtatttcaaggaaagtgctcaagagattgttcctggagagatttgtgtacatcaagtcctagaaaatacaatattggaccaggtcccgctctaactgataactagaatagctagctttgccttcaagtcctttaatgctacagtaataaatacactagagcaagaagtcttctgtcgtggcgaatgttaggtgcacagcgtaaatttgtggaagctttcgcccctcgctctgtatttaagccatcagacactgagttcagccgacttaaccaattattcagtgtaagactcatttagtgattaatcagtgtcattttaaatagtgagttccctgaatacctgttaagtaggattcacgtcttcgaaaagttttatttgcacgaaggtcataatttcagttgcattat

SEQ ID NO: 111 - DNA, 6000 bp, Homo sapiens
ggcccagctacccccagccatttcaaccactccaagtaaagcaccagacatggtggagccagtttggaacatttcagcctcagctgagctcctagctgaatgcagccttaagagtgaccccagccaacaccaggagtagcagaagaaccacccagctgagtccaacaaactgaaaaataataaatcatgttttaaggcttaaaatttaaacctctaagacttacattggttttattacaaagcaaaagataacagaatgtaagccagagtgttaccctcctccctaggggtatttatatcttaaatattttctctaaggaataggcagtatgtaaatcctttgcaattttcaggtaaggtggcccaagggaggacgttaatccagaaagatcattcattctatcaacagaatgaattctaattcataacttcaagaattctatgatttatagtaatagtaaataaaagacctatttgctaaaatatgttgaaagactaaattacatgcagttagggacttgcctatcattcgttgaactaacaattgaatcacaatttgagatatcagcaattttgtcaactgccatcctgtatttctataaatttcatcgaagaggaaaagtataatgaaaaaagaaacatcagatcttagaacaacagaataaaagaacggtgacaagtgatctggatgtagaaaattagtaggaacaattttatttaagttttttgttttattcacacaaaatgggaatgctacatttgggggagctaaaaaactgagtcaacaaactattttgcacagaagttccaaggaagataaaaatgttagtataggaaatgcttcctgccctcagttgctagtgtaggtaattatagaattgcaagatgacaggtccctggatggccttggccatgccagctcttccccctcttgcttgcaattttcaggcagaatgtactgagaatgcaacatcctgagataaggaggaagcttccagaacaacctgggctgcgtcctcatttttcctaaaacaggatgttctgcaacacttgtactcagcaatctcagttacacccagggtataaaacccaaagtgtttttggagtccctcatctgtgctgcaacatggggtatgtgcagatgaggctccatctgccctaagcagctttcctgagccatgggatcagctaaccatggatcctccatttctgtgtatctttgctgcctatttgtaaaaaatttgctttgcctgacttactgtttgagtgttctgcctcaccagattagaactaagaactattgcaagaaccactcaagagtttggctgttcaaagtttataaaataatatcacaaagcagcatagtattgtcatattactgacagaattcagaggtggcaaacaagttgacagacatttttgcaggctaggatttcaactgtatcttaaatagatttgagaaagcagcatgaggaaaggattttaggcagggaacaggagcaaaagtatgtctaaattagtctgtgatacttaaaacagttcagtgaaagactagaagaatggtacttggcagtcaagatctgtggtaggcaaaattctaagatgatacccaatggtccttgcccgcataaaatctcccctacgtatattaaaacatcatgttgtacactaaatatatacaattttgtccatttcaccttaatagagtagaaaagggggaaatttcctaacttgactatgtgggtaaaacatgaatacgatatcactcctgtgatcataggtttggatgtggttagggccgccaaaactcatgttgaaatttggtacccaatgtggcagtgttgggagatggggcctagtggaaggtttctgggtcatgggggtggatctgtcatgaacagattaatgccctcacggtggtggggggggaggtgagttcttgctctctcaggaatgaattagttctcgagtgtgggttgttaaaagagtttggctttcttgatttgtctctcttgctgcttctctcaacatgtgatctctatgcacacccactccccttctgctttcctccctaagtggaagcagcgtgaggcccttaccagatgcggctgcccaatcttggacttttcagccaccagaatcataagccaattaaacctcttttctttatgaattgcccagctttaggtattctgttataacaacacaaaatggactaagataatgttatatggcaaacgaaatttttgcagatggcattaaagttactaatcagttgaataaaaagggatattattcagatagaccttatcaactcacatgagccctttaagtctaggcttagagatagaggaattcaagagatttcagcagtggaaatattctgcttgccttcaaggaataactgccattgtgagagccacatggcagaaaactgtgggtagcctcaatgttaatggccacaatcagcagccagtaagaaaatggagccctcagtcctacattggcaataaattgaattctgccaaggacttgaagaatgagcttgactgaggaaccccaagcctcagatgagattgcagccttgatatgagccttgtgacactgagcagagaactcagtcacaccacagcagaagacttttgccccaaggaaactgtcagataatgtgttaagctaagtttgtggcaattgttacacagcattagaaaactaatacaggatcccaaaagataagagttatcatctacagaaaataggtggtataataaagctatagaagctataattccacccctttagaggttaacttgtgaaggtcaaagaaattgctgatagcaaaatatgtgatgctggggcctttctcaaattcctcactaacattcattcattctcaggctctcagatctagagtcaggtggatctgagtccaaacctgagctctaccacttagcaatatgatcttggccaacttacttaactagccagagcttggtaagttgtgacgattaataggaactatgcatgtacaggacccagtacgtattaaacactcaagaaatgttagatgatgatgatgtcagctttatacacaagaaatagggttgacctctatgccccaaaaataagatgctgagacaaaagggattccatcatttgccacttctctattttaaaattctgaaacactccctattgcctatgtctaaactccaagaaactcttaaaacatgccactgacttcaccttttcgtttcttgagacggattctcgctctgtcacttaggctggagtgcagtggtgtgatctcggctcactgcaatccccgcctcccgtgttcaagcaattctctgcctcagcctcccaagtagctggaattacaggtgcccgccaccatgcccggctgatttttgtatttttagtagaggcggggtttcaccatcttggccaggccagtcttgaactcctgacctcagtgatccatccacctcggcctcccaaagtgctgggattacaggcgtgagccaccgcgcccggccaacttcaccttttcacttattattctgcctgaaccagcacctgagctccaaacctttttttcacctggttggttgctctctcctgtacatatgcattcatacacccccattatcctgtattttaattgttaacctgccaataatatctcactatattgcacactgcccaatggttacatttccatacccagagactatcagagtaccaggcaaaaagcaaataagccatatatttttaatgaaatgaatgttcagtcttcaggcctttaagaaaagctgttcctggaatgaagaaaaaaaaaacaccaatgctgtggttgtttctacatttctatagcgtggtgtttaaacacttagcaactgctctcctgcatacacttgtgtagagaagtggttaaacaatattctcatccttcttttcccaaggagaaaaccaaaagcataccaaccttaaataacacacacagagggcaatcttgaaagacctaaaatgacatatctagcaagaagctggcagccaagcttgacgcctgcctgcctgcctgttggttcactagaagaaagtggttctcaaactttaatatgtataccagtcacctgaggctattgttaaaatgtagtctgattcagcaggttgcgggggagagggagaagagccgagaatgtgcaggtctaaaaagctcccaggtgatgccaatgtttctggtctccagacctagacctctagcttagacctgtgctgaccagtacgttagccacatgcgggtattaagcccctgaaatatgactagataagctgtcagtgtaacatgccgatttccaagacttagttaaaaaaaaaaaaactaaactatctcaatgatttgtacagaccacattgaattaatattttgtgtactttgagttaaataaaatgtactagtagggttacttccctctatattttacattccacacgtggctcgcattatagtgctactggacagcggtgccctaaactaacaaccgtctccattctgaagcttccactattgtgagactttaagaataaaagcaacacctctcttcccataggtggttcgaaagcacaccttttgttccccaactatctaccagaaataaaacgaaaaaacaaagatttaaaaaacaataaaattgagtcctttcacttctgcttaagcgccacctaagccactgcttttgtctccctccggttcccacgctccgagatcgtatcacccacagaaaaacaataactaaaaagcggtctccatccctgaagccaagctgggagagtagccgaaggtcgcgcttcctggccgccaaaaccgaggtggaggaaacttggtagtcagcgagctacgccctctcggctcctcctcctgctcctcctccagggccgacctcttcaagatggcgggcgccggagactagcttccgcttccggtgtgagcggcccggccgggggggcaagatggcggcggcagtaggggttcgtggccggtacgagctgccgccttgctccggcccaggctggctcctcagcctttccgccttgctgagtgtggcggcacgaggggccttcgccaccacgcactgggtcgtcacggaggacgggaaaatccagcagcaggtagcggccggggcgtccctcttctcccgtgcccgccctcgccccggggggattaccctgcttggcccctggctgttgggctccgcgcggccccgcccccagcctaccctcacagggaggtggcaccgcgacctcggactccctgcattcggaccaggcaggcacttcccgctccccacttgtctcctggtcctcgtttggccccctagaagttctcacccttccacctcgcgggccgcgcgccgcgtggggaagagtcgcccagctgcgggagacgggccctacggacctttttttagctcggggtttagaaatcacagatttcaggattcctgcctttggtgcctctcgggttcacgcgtcaccggccctccccgaggaaatagaaagcaggtggcagctccagggtgtgcgcgagtcccatggtatgacagcttctggacccctagcctgtggaccattcgtgctgctcccctagtctcgtctaccacatggtggatttcgtttctggttgtgttggtttcagcttgtaccgttactcaggtcagcagtggctcattagaaacaacatagaaacactccccttcagaaggaatgcttgaagatgccgctggtggcgttgcctgcatcttttcagctgttactgccctcgtttcccagtgcactttgctttgtttctttacctagttcttgtgacccagcctcgcatggaggatatgcgatttcctggattcttgtatgcctgaactaattcctcagaggcgagactgcttttcttatataactttatgattgcctgcgttttgtaaatgctgctgatgcctaacg

SEQ ID NO: 112 - DNA, 6000 bp, Homo sapiens
tgttcttggtgtgatcatctacaaaagagaagacagactaatgaacactgctgctaataagtcctgctctgaacaacatactccaacagtctcacttctgttcccccaaaagtcctgcaactgggcatcactgtccctgtttacagatgagtgacctgaggctcagagagggaaggtaacttgctctgccttacacagcccagacctgaactctagcgtctcaccgtgaaatctgtaacgtttctcccgcaccatcacataccgaaggcaggcgtctgtgcagaaaacaggctgctcagaaagaagagtgcttacttttggcgagctcctgtgcgtcacatcctgggcttcctcactgctccatgctctaggtaccattctcccccttttagagatgaggaaactgaggtctggattgcagaagctgagtccagattcgcaaacctgtccacagggcttgccggaacttttccaggccctgttcagttccactgggtttcataactggcttctctgtttactgaccattgtcccaattagcaaaatccctggtcagaagggcgggtgctcctaggaggacccagagaacagcagtgagccaaaaagtaaatagactccaagagagggctttccatgagtggctggctgcctggaaaatcaagaacaacagtgtttggagtgaagagaaaagaacagggtggtgtcttccaggcccagccaaggcctttttgtacactgtggctggggatggaaggggcgggggaggccacctcctctggtctctggtagggggtcccgcagacatacagagaccaaggttacagaggaaaggagggcccagagctggttgtgttgtggaggtcctgggtcaactacaggggagggaggggtcccccagggggacatgggctgtacagcccccatcctgtggcagacacagagaatctgcctactgtgtgcctggagctgggcaggatccaggaatagccgagatcagaggtcaaggagatctccgaggtgcacagaagcagagaccaggacatgctcatgtactgagttggtagcagaagggctgcctccaaatcaaagaaaccatgccagacctgagtgccatgtggctcagagggcaggtgccacagccagtcctgcactaaatggccacagcctggggatcttccaggcctttggcctgggcagtcacatcaggtgtgtgaaaggctagagggctttcccggtgtcacctcctgccctggcctgggaagtgtcgtggggacagctgctccggagactcctggctgccaggcttgacttgggcttgattgatttagcctgttacctggaaagggcactgctgctccctgcccaggtcaggtggtgctaggagctcctgcttggtctccgcagacagagcctgggctctgaagccagtcagacttgtgtttgaatcttggcaacacctctttccagttgagtgacttgaacctccctgagtctcagtttcccaggctgggcccagaggtgaggtggcatgctgctatcagtgactgcagtgcctccttcctcaagtcaggggctgtggactgtctgatccagaacggcctgcagaggtgacctggccgaatgtacccattttacagatggaaccctgaagctcagagacttgtaggtcctggatttggttgtacaaccagtatctggtactgcttgggctaggaaagaggcttcgagtcagagcatcaggccctaccctgtattttgcatatgaagacactgaaacccagaaaggtacagtgacttgcccaaggtcaccaggaagtcagtgtcagagccagccctagcactcgggcctcttcctttccacctaggggtccttctcttgtacctgaattcccccattcccttgaactcatacatcttcttccaggctggaagcagagtaagacaatgttgcccgcatcatggtctccactcatcagtgccctgtagcaagggctccagggtctgtagtgagggctcccagagggcaagggtggggtctgttcaccagctctcctgtgccaagggcctgggctccagagctatatggcaggcaaagctgcaggccctttgtgatcattaacgtggtccctgggttgatggccagtggcctctggggccaaggtcaagccacagcagcccctctattaatcaccaactatgcaggtcagagtcacactgctctggaaggggcccctcagctgggcagttgctggcccaggttcagtctgggggctgggcagctaagaaaatttcttcctacttgtttgaattttccaaattgtctaatgagcaggcatcactataagcatattttaaaagggattgtttctggatttgtgttttataaaagaacaaaactatattggatatacacttgtaaagtttcaaatgctacggcaatgcttttacaattttttcggctagtatattaaggtataatttacatatcatagtgattcacacactaagtatacctatagttctatgaattttagtagatttaattggttatataatcttcaccataatctagtattagaatatttttatcaccccgaaaagttccctcatgccaactgcagtgatctaggcacttcctccagcctcaggcagccacggcaatgtttgaggatgaaattctcctccttcttccctttccagcaaacggccttaacagtttggtgcttaccctctgattttttaagggtatatgcaaaaacaggcaccattgtaaaaaggagaagaggagatatactatagccattgttgtgcaattgctttctgcacttggagatctccctgtgtttattgagtgcctactatatgccaggcacaatcagacgtagctcattcttttttcacagctgcatagtgtctattgtaatggtggctccatcatttatttaaccaggacttttgggtcctttccagttttcttcaaacaatgcttcagtgaacatccttgcacatatatttttgtgtttgttggtaagtaattctgtagaaagtggaactgttgttgcgttgtgtgttttgagtttggataaattttttatctagagaggtgaaactggtttatgcttccattaagagcctatgggagctgtggggttttttataatatcatcctccaaatggctagggggaagggagagctctctgaatttaggccagagctggcccactgcaggctgggcaggcccaggcctggacttggagcccggagaactcaggtatccctctggggccccccacagacaccgagacaaagttcagactcttcagtgtggcacacaggcctcggtgacccctgctgccctctgcagcctcctctgctcttgctccctgtgtttcatactggacccctggtaattcactggatatggttatgtttgcctgccctttgcctatgcgtcccctccccctggaatgtcttttcttcttaatctccgtcctccctgtccttcaaggcctgggtcacaagtccctttctccacgaagccttcttataatctctccagcctgaattgtcttctctgtgttcctttagtcttttatctgaaccatatccccccttaggtgggagcaagttgtgggtgggagagggcaaacttcagcctcattagatagaggctggacttccggaagagctgggaagggggaccatagtttctggggaggggtggagaactcacatttacctagctgctggccaggctattttcatacccacagaccgatttaattctcaactactgtactcatttagtagatgagaagaatgagacattgaaaacatgcacagtggaggtgggaatgaaagccagctctccaactctccagtcctctttcctgtcactgcatcaggctgcagggtgaaggggaggtctgggatacaaagagaacttagaggtggagcagttggattctgtgcagtgctaggagggaggagaggggttggagtaggtgggaagtaggcctccttcagtttggatagcacttcccttaacccaatgactctagtgggagggtggagggatggggatgggaagggagcctgggagtgaggaggaaaggcaaactctgtcttcccccaggggagtcaatgaatagtacctaaaatggaaaccaaacaaaacaacttcaggaagtaacaagggcttgcttagagacatgacggtaaaccctgaaccatcagctaaaagaggtagatagcagtggttgcccctggggagaggtaaatgtgatggagagggaacaactgtgtacaaacatgtgactttacgttttgatcaaaataagacttttaaaaaacaaacactttttaaaaagaaggaaagaaaagtaggaggggctatcccaggagctgagcgttctgccccgcccctctgagtcctgccggcttcacctgcccacgggagccgggtcccctgccctgctgcggcgcatgctgcctggtgggggttctgcccaggcccactacggcctgagttcaaatcccggcagcaccatttacaagctgtgtgcaagttgcttcaccactctgcgctgttcccccctctgtaaaatgggttggccgttgtaccctctctgaaaaggatgtgctgatgcctcggtgaaaagctttcaaaaattgttagttcatgttatttttttgctggaggtgttaggtgcggagaggcgagggggctcgcgtgcgtcgcaggaggctcagctgggctcgccgccgctcgtgcctgcgcccatttagtgtgcacacagctagcgcccgccgtatgtcaggcctggtgctgggtctccgccccggagctggggtgcaggggctgccgcgccctgtcgggtcgatccgggtgggaacccagatgtctccaagatccgagacagatccccgccccgcgccctccctggggggcggtccccggcttgggcgggatgggcgggcggctacttaaggtcggcgacccgaggccgcggctgccgactgggtcccctgccgctgtcgccaccatggctccgcaccgccccgcgcccgcgctgctttgcgcgctgtccctggcgctgtgcgcgctgtcgctgcccgtccgcgcggccactgcgtcgcggggggcgtcccaggcgggggcgccccaggggcgggtgcccgaggcgcgggtgagtgcccggggggccccggggctcccggagtaactctctattgtaagttcttgcagatacagcgctaggaaaaggggagtaattcaggtctagaatggaaaaactgttttgttgctttgtaagtatctcttgctgcttccggggctctggctcgcagacgagggtgggagcctcggggccctggctgttccttcccaggaagctaacctcaccttggccggatttcttttcccctgtcctcctctaacatcttacctcctgtctcctgaattctccttttccttctctgattttttctcccctctgcctcacttctctccttctctcttctgatgtcttcttccatttacgattccttgttctcatttgatctctctccttctccaatatttccttctttcttgtatgacctcgcctgtctgcttatggtcattattatcatttcttctctcctttctgctgtcttccctgccctgtctggtttcgtgtttttccacccttctgcctgagttctccccaccttgtttctctgacttctctcctctgatttttactcccaccagatctcttctccggccagaggtgacctgcacctgctgatttttgtcctcgactccagcctaaccctcctgcaccctccccggccccagccccagtgcatgtgtaatagcctccccatttttaaccacttcatctccaacagcctcctgcagaccctggtgcatcctcttctcctcttccaagaaatgaaatttgggggtggtgtgttgtggggcaggagggaggaggcagacagcgcaggaggcc

SEQ ID NO: 113 - DNA, 6000 bp, Homo sapiens
atccatgcttaccttatagaaagataactactttatgttatggaatgaaatatgtatatgccatacatttatatcttctgatcctatttttaaaaatcagagcgtatatatttgtaaatgcacagaatagaaattctctggaaggttgggtatcacactactaatcattggttgactccaagaagtgggattggagttggggagggggagagaattgtttttactttatacagttctccactattttaatttttatattagcatattttgcatttgtgattgtaatatattttaaattttattggtaaaaattataaacaggaccctaattaaactcattactgaaaagaatttaaactcttcactttgtaactctgccttgcagttatgcactatacttgaagagaaaataatgactccataaagtcatgagaagagatgagtggagtgactgttctacatagtggttcagtacacctctgtgttcgtcttccttagaaacctcatatattgtatccctgttggttgaaaactgattatttgatctatggcataaccttgaaccgaaaagtctttgttcttatcatataattatatccttctaacttggatcactactgcattttgtaatcctaatagataatctataaggcacgatcatgttcttgattaactgtgcaggacacactgttggttatatttggatctttcatttctgccttcctccttctgaactgatccccagttgagttcatacgttcactccccatcacacacacataacccttgtgactcaggggaagctaactccatccccagttcccagggtagatcaggatttgtctaactagtgattctcagagtgtggtccccagataagcagcattagtatcacctggagcttgttagcaatacaaattattagaccctattctcaacctactaaaactagaaatgtgggtctcagaaatttgtgttttaaccaactccagaagtgattctgaatgatattagagtttgagaaccactgttctcaatcaaggctggtaatcttgtactctttaccagcaactgattcagtgcttggtcttcccctggctacggttaatgttccaaagatggacatgtaacctagattgacctaatcagaatgaaaggcagaaattttatccaaggatgaaagagattttctgtctctcccattgaacctaaagaagatctgacatcttagaaccttgagagaagctaacctgaggacaaagtcaatgtgaggtagaaccagaacttctcaaagatagagagaacctagtcgtaactgcctgggcccagtcctaatctaatttacagttcagtgagataacagatttctttattgtttaagccactttgaattggggctttttttgcccttgcagcctaaagcattcaacttattaaaacacatataataattttctaactgttcaaagttaaatctgaattccccaagcaagttgtattcctactgccttgcctctagtatagcggttttaacacttaattgtctgatgttgtgaataagaacaaacacatgtgaatgaatgatcatgcactgaaggagcaggcagacaatatcgttttcattactcttatcaaatacaatttattcaaagtcattaggaggctccaaaaatagttaatccactaatgcaaacaatgaattggcatggtaaccttagttttaacactatttttgctgtaactaagtgaaattctttccagctagcttaagcaaaacggaggtctattttaagactactggagtggctcacagaccatggattttaccccaactccagccaacaattatgtgtgccattgatgaggggagtgtatctgggtcaaagaaaattgaaattgatcaccaattatgaaaaaacaacccattaatccacagggctccctgtgagtaggaagaccagaaagaaaagatatctcccaatctgctttttggcttcttattcactccagagcaaaacaccattctgtgctatgtgctagaagacatccatgggttttataaatgggacaggcctgtcaatcttctggcatttgggatactttttgctagcacagaagaggctggcaatgagtcatggatattgccagaagatagttataaggaatcaggcagcaaaccaagccctggtactgccactccatctctccagctctgtgcagggcccaatggtgtgttgagggaccctcataatttttattcccctcccaattcaaaaatctgagcttaatttttggaaattgcctcaggcactagagggtagtaggaaatccctcctcattgtgttgtacaaaatttgcaatacggtattgccctgaaggtaaaacatcacttaattgtaaggaatttcccctacatggattacttcaaaaacacagattttaaaattcactggcccagagttcctggggcctggagtaaaagcattctgatccttgaaacttcagtttgccaggcccagtttctcaatttcgctatttgtaaaatggtcttatctaactcaaaccgaaaagctctcagttctgaaggaaaaatgctataaaatttaaagtttaacaacttagacaaaacaacaagcaagattcccagacatgacacacaaaaaacccttacgggggaaaatagtaaattgagctatattaaaattataagtatctattcactaaaagacaacattaagagagtgaaaagtcatcccacgaagtgggtgcaaatattcgctatatgtatatatccaagcagagacaggtattcagaataaagagtttctacaagctaacaaaaaaagtcagacagctgaagccctcacatactgctgatggcagtgtaaattagcacaaccactctgaaaatttggcaggatctactatgacccagcaactctactcctagttacatacccagtagaaatttttttttattatactttaagttctagggtacatgtgcacaacgtgcaggtttgttacatatgtatacatgtgccatgttggtgtgctgcacccattaactctagaaatgtgtgttttttaaaaaaaaaatctggatgctggttgcatgggaggtattcattttgggaaaaattcattgagttacattcttaaggctggcataattttctctatataatatgcttcaataaaacagttttttttttaagaaacagcttcacagaacataaagatttacatttatggttcagcaaaattacaaatatttacttgtattatgcttgaaattcaggtccctcatgagttcaaatcatgcgtaatgaattgaaaatacttaatatacataatgtttaacataaaacggttcttaagattgaaggcttcaatgatagaatggctggaattgaaacctacctctgccacttactgtgtgacattgggcaaattatttaatctatgcttctgtttcctcatctgtaaatggaaatattaatggcatctaccttagagggctgctgtcagcattcaataagttaacatatgttgaaggcttagtgcagttacacacagaaagcactcagtaagtgtttgccatttttataacattaatgtttgtttaacaaatatttatggaatcttcactctgtgcaaggcatagagctggttgccagagcaatgagagaaccaaagaaaataaaatgattaaatcctatgggttgaaaaccatggagagtccagggcaatgacgcacatacaccatacagtggataaatgtttgttactgctgctgctgagatagcagtaagtatggtactttcatttaaattacatctcgagactagcaggcggaaagccttaaatccatattcaacttgaaggttttatttgagcactagaaagagatttaacagtaatggcccatgaatccgaagatgggattcaacttccaaaactgggaagttaatgaaaaataagtttaagtaatgcgggtattgagtccctagggctagtgtggcgttcatgtagcccacacgaacagagctaataaaaagccatgtgtaaaaacaatataaatcatactgctgtttcttggacttgaaaaactcatcatgacacatttttgaaaaaacaaaactttggattaccatgaatattttgacgatattttttcctaagcaagggaaagaggagtcccctttaaaatatagaacgtattcattgagtggaagaccgatcctatatcaaatgtccaggttctacagacgcctgggtccatagcacattatccctctcaccaaaaccaaaccaaaccaaagtcagtttcatttgaatgcactcttgccatggtttcaaaatttggaaagctcttggaattaaattttgagatgtaaaggctggctgacaaattcacagaaaccctctttccgacaccaacttataaatcctaaggcatcctacaaccccgtgggtgctggtttctagtttgcaacgctctaacatagcttggtagagctcagtgggctgggaccataagcattcgggattgtgccactgaaaaactgatgtcacatcaaaaggaacacctttcttctaatatactaaaaaggttttgtacaggctgggtccagaggtcttagggctagccaattcctgctcccaggtattctaagaagccggagaaagctccctgcaggtaaggacccatcggcgcttcccgcactctgccgcgcgggaagcgaaggttggagtcctttccccacccccggagggtgggcggggccgaaggaccgcaccgccccagacccgccccctgcgcgtggccccgcccacagctgctcctggccgtgcggccgcgcggaaagcggaggccgggggcggggctcaccccttgcccttgggggtcccccgggctctgccaatcagcgagcgccctgttggccatccgcagccatccgcgcccctccctctcccgccctcctccgcgttccagaatccaagatggcgggatccaggcaaaggggtctccgggccagagttcggccgctgttctgcgccttgctgctgtcactcggtcgcttcgtccggggcgacggcgtgggaggagaccccgcggtcgcgttgccacatcgccgtttcgagtacaaatacagcttcaaggggccgcacctggtgcagagcgacgggaccgtgcccttctgggcccacgcggggagtaagccggagcagagggctgggggccgggttcctctcccccttctgctgcctcttcgcctttcatccgcggctaccctggtgtgctgaggttcccgttccagcagctgcacaccatatgcgctgtggaggggaccctcctggcagcccctccgccgggtccctcctggttcgcacggttccctccgcttgtccccgagtctttccctcacccattctgttctctctcacccgcctgctgtcttcccttctttgatctcgtcggtactttccgttggatctagaggtgtttggttacctcctacacttcctagcactcaaacttgcttctaggtatcatgtttcacaacgccacgtctctaggagaaatgtgccctacccccagccatcccaacctgagacatgttctagaagcccccttacttcctttcccgcttccaccccccacccccgatccccgatttctttgctccggtgttagcaatggttaatgcttcgcttgaaccccatgcccactgacggctcctgagatggcatatagtagtattagagtaattttttaagtctttgtatgtcagaagacattcttatactgttggaactacacattttcctctcagtgacttggtgtggtctttgatcttttctctcgtagtaacacattatgtaactttttaggagaagggatatatttttagggattgattgtttctgaacctgagactaagaatagcattacatttttagccctttaaaaaaattggaagcattgaaataatc

SEQ ID NO: 114 - DNA, 6000 bp, Homo sapiens
taaccagatccttcctgggtctgatttgggctttgattctacaaatccagacagactcagttccttgtttcttgcttgttggaatgggcgttgtagcctattcagtatctatgtcttccccttccttgttcctaacacaaccttttctttttctttaattttcctaggggggcgccccaaccctagttccaaggcaggtctagtccaatcagggcatgatagccccctggctgtaactcaagatggacccatcagactgagaggagggtttatgttccatagttggaaaaagtattttcctctctcacctgctatatgtgagcaagaaagcattccaccctgattgccactccagccatccttgtggatcttgtgaccaggcggccacccttctaaggttgaagtcagtgctgcggccagcagtggagagatggaaagatccaggacccttgacatcatgcacatggctgaatcaaccaatcctaaacctctcctcccaggcgcttcctttatgtgcaagaagatatttcatttttattttttatttttggtacaatgtgatttaaaaaaacattttatgtaaacaatttcaaaatattatgggtacatcatattcatgtgtatattcatggggtacatgtgatgttctcatcacatgtgtaataatcacatcagagtaattggggtgaaatgtccttttttatttaagtcagttcaagtgagttttctgtttcttatagcagaaaatatcctaattggtttgcttgtttggtttggttttgtttccctaagcctgtttctctgaagtcagcatttcttagataactttttggtctcaggaatcctttccatgctaagaaatattgaggacctcgaagagcttttgtttattttgttttatatcaataaacatattgatatttgctgcattataaattaaactgaagtctaaaatatttaaaaacaaaaataacacattaacatcaataagatattttttggctgggtgcagtggctcatgcctgtaaccccagtgctttggggggctgaggccaaaggatggcttaaggccaggaatccaagaccagcctgggcaacatagcaagaccctgtttctaccaaaaaagaatgagagatattttaatgaaaaataactaattttctaaaacaaaaatgttagagaaaagcatgcctttctttaacatttttttgcaaatctctctaatgtctggcttaatagaaaatagctggattctcacatctgcttttgcattcaatctgttgcagtttgttgttttggttgaagaacatgaagaaaatccagcctcaccttgatatttagtcagaaaagggaggaaaattttagtagccttttcaggtagttgtggagattcttctttgatactataccaaaatttgcaggttgtagtttcttaaagattatttgcaatgtggaatatgaaaccatagtaatgaatattttatattttgtttcatcagagtctattggtctgtcttatactttgagtggatcatttactcagaaatgattttgtaacactgtgcattggccatttggaaaaatttatgcagatatgtcaaattttgatatgtttcattacataatataaaaaacccatacttttaaatatcgccaccaagatcatcagaaaaattttgaagcattgggaagctgtcaagctcatagcaaaaacatcccaattgacaagttttcttaaaaattccaattttcacctgaaggcttgtattttatcattggctacaatactggcagtgggtgtccttgaaatgacagcctcattttgctcatttttgagaaaatgcctgccaaagaccaagtgtaaagtttgtcagtcactctcttgattaaaaatggtcttccgtgaaaaaagtggctagttcagtttgcaactctaggaattgtaaacatgctttttcttgagtcagtcattatgcatgaatgtacagcagaagtgatttattcctatttcccattttatcatgtataatattaaaatgatcttaaggtcaagatttaataatttaatggctacctcaagggcattctaaagtgaaactgatttttttttttcctatagtgtatagttgtgaagaatacagcgactatgaatattgtgtacctcgatttgtgctaaggcaccatcagttttcctcactgttgcttttgcactattagtgcaaatgtcaacatagtgaaaaagacacataacatcttattatcattattgaattagttttcactttgaagattccctgaaagggtctcagagaccccaggagtccacaaatcccactgttagaacttctgctttggcttacagtcaattctggaagcaacatgacatgcttccaataatctccccttctctgaaatcaaccagatttggttttgttgcccgtttaccatgttaaaaatgtccttgtttatggttatttgaattaaaatgtttttaaagaactctaattgagggcaatttttaagtaagcaaatgattagaaggaaagattctaaagtttcacgttatgaaaaaagtctaacatttatgctttctacattcttgatgttagcattaaacaatcaagcattgtttaatgactgatgtagaccatcagtccacaaattgtggcaaaataaggaaaacagcactaatattttctctgtcctatggaagcttccagtggccttgagctgggtactatttgtccctacttcagattttttttttttttttgagacagagttttgcttttgttgcccagattggagtgcaatggcgcgatcttggctcaccgcaacctctgcctcccgggttcaagcgattctcctgcctcagcctcccgaatagctgggaatacagatatgcaccaccacacccagctaatttttatttttagtagagacggggtttcaccatggtctcgaactcctgacctcaggtgatccacttaccttggcctcccaaagtgctgggattacaggcgtagccaccacgcccagcctatttcagatattaaaaacctggtattcagtggttaaatacttggccaaggccattcagtggtcaaacctttcatcctggctaagaggctcaaagcccaggacctctttgctgtatcgtgcaggaatttctgataagtacaaaaataagaggctgtgatagctgaggtttatgccttggagaacagttctccaaaatcatggaatcagaggtgtttctttaaaaacttacttttatatattctatcatactgatatgatgatgttgactctctactaatgcaacatttttaacataccagaaggtgatatttcagagttagaagagacctaaatcatgtgatctatccatatctcttatcactggggcatatttaacatggaatgcatatttaacatgcatttcagaagtaccttctggatgatgacttctgataatctgattgttgtccatccccccagatcaaaatgaattacactgtaggtggcaggcagcttctaggatggccccaatgatccctgcttcctgatattcatactgttgtgtaattccttctccttgagtgtggataaaacctgtgacttgcttctaactgatagaatatgacaaaggtgtgagaatgtcacttctgtgatgaggtttcataagacagtgacttctgtcttggtaggtgactctttctattgctatcttgacttgcatactttgatgaagcaagttgctatgttggaagggccccatgccaaggaactgagggcaacctctggccaactgccccaaggaaactgaggctccagtccaacagccagtgcagggctgaatctggccaaaaaatgctgattgagcttggaagcagatccttccccagttgagccttcagaggagaccccagccccagctgacaccttgattgcacctttgggagaggctctgaagcagagaacccaggtaacctatggtcagtttcctgacccacagactgtgagatactaaatgcatgttgttttaagcagctaggttttagggcaatttgttatgctgcagtagacaactaatacactgtactatatttgtctctttttccagcaggaccagaaatgggctgtttaaggtccctgggaccttgtcatgtcatgtgtatttaactgtttacccaccaccgaaaagcttcctgccaggacccatctgcagtgtaaaaggggaaccctgaagccctgggaatggctcctagtacttcaggtaggggctctgtgtccccatcagtttccacctttgggcctcccactagaacttccttaattgtctttctccacctaagcatcatttagcttacaaaccagaggcagcaagccaattattccccggagaaacttcagccaggcaggggggcattaaccacaccaactggtgttccacaacaaaggtatgagaggcagagattcacatcccagtccggttcgtaagcagaggcgcatgaaataagaaaccccttttgagaaagagggaaattaggggagatactgaaattatgcgttgcataggacatcaggcaaccacttcactgtcggcttcagtttttgatctgcaagatgggagtctacttctaggtcccatagtttttgattcttagtctgacacaatgtgggttgctgtgagctggctctttgggtgccaagtcagctatcaaatgtgggtaacagaatacctgtcttcaaagggggttgtagaattaaatgaaataaataaaacacgtgaaacgtgtaacacagggccagcccaagtgtcatcgtggcagttgctgcttcaccacggggtctcaagtcccgaggaattggggtcgcgggcgagcggagcgcagccgggacccaggccgggtggcctgccccgcccacgtggggccgcggcccgtcgaatgactccttgcaacgtgttggtggtggcggcggcggtggcgcgggctcttccgggcgccgcagcttcctgccaagcaccgcgcagccgcctccgccgcaggatcccccggtgcaggcctccgtgctggtgcggatcctggagctcagccgcgcgcgccctgcccgatcctgtgccgacccaccgcactatgcgcgccgtgccgctgcccgccccgctcctgccgctgctgctgctcgcgctcctggccgctcccgccgcccgcgccagcagagccgagtccgtctccgcgccgtggcccgaacccgagcgcgagtcgcggccaccgcccggcccggggcccgggaacaccacccggtttgggtctggggcggcgggcggcagcggcagctccagctccaacagcagtggcgacgccttggtgacccgcatttccatcctcctccgcgacctacccaccctcaaggcagccgtgatcgtggcgttcgcctttaccaccctcctcatcgcctgcctgctgctgcgcgtcttcaggtgggccctcccgccctcttccttcccccgccggccgacagggcggcatcgccaacctgctgtcgccgcgcgcccgccccacctgcacgcacaggtgccctggtgcgccccagccagccgtgtgcctcctgccctgcccgggagagtgggtggggggccggggtgtgctcgtctggattttcctggtacatgttttaggaattttctttcctctctttaactatatatataaaataaatatgtggttcccatttgttggctttctgctaatgctgaacactaacaatagcgctctgaattctgacagcgtttcccataatttatttttataatcatttcacagatgaggaaaacattttcagagaggcaaaatggctcatctaaggtaaactcagtggtggaggtaggacttgaacccaggcctgtctaactttaatctcgctactccctctcccttctaccatctgcagctccctcacgccccgcctactttttcttcttcttcttcttcttc

SEQ ID NO: 115 - DNA, 6000 bp, Homo sapiens
gaagatttgatacacacacatgattttttttttcttttcttttctttttttttttgagacagggtatcagtctgtcacccaggctgcagtgcagtggtgtgatcacagctcactacagcctccacctcctgggctcaagtgatcgtcctatctcagccttcagagtagatgggactacaggcacacaccaccatgccccgctaatttttgtattttttgtggagatagagttttgtcatgttgtgcaggctggtctcaaactcttggcctcaagcaatacacccaccgcagcctcccaaagtgctgagattacaggcatgagcaaccacacctggccgatacatacctatattaaacattagtatgttcatgttagaataatgtaccttttgaatttcataaacttggagaatatttatattgatgatggatgaaagaactttcttggatggatgaagagagtaacgctgtgaaacaaccagcaggtggcgaaaactggcaatcaaaagctttttgtttggtggcctggggaatgaagacggaaagaaaacacaggccattcagactcttgatacaatctccattccctgcatcttgttttttttctcttcctggtgccacgctacttgtagaatccaaccaggtaaagctgccaaaagggtcatccattggctcttacaagtagaaaacatcttggaaagtgaaaagtccactgtgcatatgtttgtaaggttgttggaaggtctcaggcatagatctaggattcaaatccagttactcctgcctcaggctggtgttccctcccccacctcagcattgcccaaagacgagtagtcaatgtcacatacttcctgggaatacttgcccttatgctttaaaatggaatctaataaacatggaatctgaacgcaggaatggtttcactctttcatttgaaagagtatctagaacattcccagggaaaatataacccctagccaaagactgcaatacagacctgtctcaagactgattatagccaagatgccacataaggaatcagtctgggaaaatccatagagtgaggctctgtgggagcaaaggaagacgaaaatcagtcagcttttctttctctggaagtaggggatccgtttccttctggctgccccctttgcagaagtacagtttcttttgcaggtttgtcctatcatttcctcactcatatgctgagtattaggagcttgaagcctttcaattcctcttaggtaattttggggctttaaaatacgctttcaagatttctaaaccatactgttgtgcaattggtatgaatttatgtgagaacatttattctaggtcaatctatacccagtgtctatccagaccaaaacacctcccacgcgcataaaagggactctgtcccaaccatcagaagggcaagaaggaggatctcctttcatcccctcttgcctggataagaaatttgtacccaggcccccattcctatgtgagagaagttggcttgttgggctgatgggatacaataaatgaagaaataaaataaaaacacccaagagagatggcagtgcgtatagtcccagctattcatgaggctgaggtgggagaatccttcgagcccagaagttcgagtccagcctgggcaacatagcaaaagccatctcttaaaaaaaaaaaaaaaaggccaactaagtaaaaattaaaaaaatcataatttggtgtgcttttctggctttttaaagaatgttttgattttagagtaggaatgagacaaaataaagatgtcaggcagggcacagtggctcatgtctgtaatcccagcactttgggaggctgaggcaggcggataacgaggtcaggagttcgagaccagcctggccagtatggcgaaaccccgtctctactaaaaatacaaaaattagcagagcgtagtggcgtgcacgtgtaatcccagctactcaggaggctgaggcagaattgcttgagcctgggaggcagaggttgcagtgagctgagatcgcaccactgcacaccagcctccaagatacaacagagcaagactctgtctcaaaaaaaaaaaaaaagtcatagcatatttgtacacattgtagtactcatttgtcatctttcttgaccccaataatccagtgtccctatatatttgcactcgagccctattaagtaagccgctgtgcttctagaagacctttttcttttcttggtgctttgtcaaagactcttggagataaaaatacacacgtgcaacttgtttgtcctcttgtccttttttgctaggggctattcatgctgattaatttaaaactgtctgcttgcgcgtacacacgtctgcgagtgtgaatgtgtatgtgtgtatctatgtacctcatttgagaaagtgcggccaactaggattggctacgaggcaaaggtggagacctttaggagcccacccaccccagcgttaggacggtgggcctgaaagttactatatggaagtcctcatcgtgtagcactaaaccagtgtaaaaggtgttagggacagagggaaaacattgacttaaactgtcgtaaagcccttgataaaccccttccctggagcgctgagttctgcatggcctgggccacggactaggtgttcaggtggacacgggcggggatgcgcgtgcgtgtgtagtgcgcggacacctaggaagctacttgaaagtaaacaccacgctcggggcgtccctagacattgcttaaaacgtgcagagtcacctgtcttcacagcagggcagcgctgaggtcccactgctgggggcggtggggggcggcattggcctgggtcttcccccggcggccgagcgccggtaacacaacgtgtgtgtgtgtaggcgcgtgtacacactctcatacacggctagaaagggtccaggcgacacacacactcccacatacacggctagaaaaggtccaggcgagacacacacacacacacacacacacacacacactccacacacactcacacggccagaaagggtccaggcggttcccggcgcttttccagcccttgttttcatggcgcaccctcccgccagccgcccccctccgcactccgtcgtccgcccggcccggccgcgtgcggttccccgggagcccccaccccgtcgcggaccccagcgaccaccaagtccgcacgcggcctgccgcaggcctgagcagaaggccccgcgcacacccaccgcgccgcggccgcgcgggaggcctgtgccgcccgcgccacccactggccgggccccgcgggcgcagcggagcgggcgggtggccggcccggacgcgccctccccggccgcggccccgcgcgccatgtgcccccggcgggacgcgccactcccgggcctgccgcggcgcctttaacccgggccagggagcggggcggagggggcggtcgggtggctcagaggagggctctttctttcttctttttttgaatgaaccgtgtgacgttacgcacaggaaaccggtcgggctgtgcagagaatgaagtaagaggacaggcaccacagccccgctcccgcccccttcctcccgcgcccgcccctccgcgccgcctgcccgcccgcccgccgcgctcccgcccgccgctctccgtggccccgccgcgctgccgccgccgccgctgccagcgaaggtgccggggctccgggccctccctgccggcggccgtcagcgctcggagcgggctgcgcggcgggagctccgggaggcggccgtagccagcgccgccgcgcaggaccaggaggaggagaaagggtgcgcagcccggaggcggggtgcgccggtggggtgcagcggaagagggggtccaggggggagaacttcgtagcagtcatcctttttaggaaaagagggaaaaaataaaaccctcccccaccacctccttctccccacccctcgccgcaccacacacagcgcgggcttctagcgctcggcaccggcgggccaggcgcgtcctgccttcatttatccagcagcttttcggaaaatgcatttgctgttcggagtttaatcagaagaggattcctgcctccgtccccggctccttcatcgtcccctctcccctgtctctctcctggggaggcgtgaagcggtcccgtggatagagattcatgcctgtgcccgcgcgtgtgtgcgcgcgtgtaaattgccgagaaggggaaaacatcacaggacttctgcgaataccggactgaaaattgtaattcatctgccgccgccgctgccttttttttttctcgagctcttgagatctccggttgggattcctgcggattgacatttctgtgaagcagaagtctgggaatcgatctggaaatcctcctaatttttactccctctccccgcgactcctgattcattgggaagtttcaaatcagctataactggagagtgctgaagattgatgggatcgttgccttatgcatttgttttggttttacaaaaaggaaacttgacagaggatcatgctgtacttaaaaaatacaagtaagttctctgcacaggaaattggtttaatgtaactttcaatggaaacctttgagattttttacttaaagtgcattcgagtaaatttaatttccaggcagcttaatacattctttttagccgtgttacttgtagtgtgtatgccctgctttcactcagtgtgtacagggaaacgcacctgattttttacttattagtttgttttttctttaacctttcagcatcacagaggaagtagactgatattaacaatacttactaataataacgtgcctcatgaaataaagatccgaaaggaattggaataaaaatttcctgcatctcatgccaagggggaaacaccagaatcaagtgttccgcgtgattgaagacaccccctcgtccaagaatgcaaagcacatccaataaaatagctggattataactcctcttctttctctgggggccgtggggtgggagctggggcgagaggtgccgttggcccccgttgcttttcctctgggaaggatggcgcacgctgggagaacagggtacgataaccgggagatagtgatgaagtacatccattataagctgtcgcagaggggctacgagtgggatgcgggagatgtgggcgccgcgcccccgggggccgcccccgcaccgggcatcttctcctcccagcccgggcacacgccccatccagccgcatcccgggacccggtcgccaggacctcgccgctgcagaccccggctgcccccggcgccgccgcggggcctgcgctcagcccggtgccacctgtggtccacctgaccctccgccaggccggcgacgacttctcccgccgctaccgccgcgacttcgccgagatgtccagccagctgcacctgacgcccttcaccgcgcggggacgctttgccacggtggtggaggagctcttcagggacggggtgaactgggggaggattgtggccttctttgagttcggtggggtcatgtgtgtggagagcgtcaaccgggagatgtcgcccctggtggacaacatcgccctgtggatgactgagtacctgaaccggcacctgcacacctggatccaggataacggaggctgggtaggtgcacttggtgatgtgagtctgggctgaggccacaggtccgagatgcgggggttggagtgcgggtgggctcctggggcaatgggaggctgtggagccggcgaaataaaatcagagttgttgcttcccggcgtccctacctcctcctctggacaaagcgttcactcccaacctgaccgataacgcctgccatctaaaagtctttaacttgcttgctagtcgtggagatccaaagatctagcgtttgtaatccagtaggatgtggtggtaaatggtaccccttcagtgtttctcaagctgaaggtccaggagtccccaggaccaccgtttcctggcttgagcagcttgttggaaccggagggaggtttcagggactgctta

SEQ ID NO: 116 - DNA, 6000 bp, Homo sapiens
aataataaacagtacagaaaggtagaaaatgaaaaataaaagagccacatcatcccccttttcagagaaaatcaagttgcttacttaagatatttctagctataactgatatgcctttggttcctggtgttttctcgtacttgggctcttgcccattcaactaagtaggcattttataaaacttgcctcagtggagggataacattagagaccacaggttaagaaaaccaatcaaccaaccgaatttgcttcttgatgtaatgagtttcaaaaggccagtcctcagtggaaaggcagggtctatttacacaggaacagaaagagtttcagggaaaaaaacccgatgaggaagagtgaatcttgctaactgggaggactggataggcttccctgggctgggatgatgggaagatcatgactactcagtaagggaacatggtcagggaaagggacctggtcaaggaaaatccttggagagcagagttggcatcacagacaccatcctctaacactatgagcactgctggtcacctccaggacctgttggcactgagtcttcattcaactaagacctatacaactgttagttttcctttccatggcattccaccttccaaaatccaggaggagagaatatgtgccctaagaggggcctatcctgaccttttgatggcctaggacatgtgtgagttccccaggttagagagtgacacacagcatcgatggtactgaggtgacatggaaggtccagcaccttgatgtgtatggcactgaacagagccagcttcagattcacccctctcctcctgagccagtaaaatggaaaaacacacacaattacacacacacacacacacatctccctccttctcttcctctacttttacacaaactgcatcacattatacctattgatcttccacttgcatttttcacttagtgatatagctttgatatcagtctgcaaggatctaatctgttttttaaatggctacttggtatcttcataatttgactggtccccaactgatggacctttagttctctctgtccctgtctctcttctcccttctccctccccttttctctctcaaatattaccaagctatcatgagtatcctttcacataagtctttgaacttttgtttgaggtaaccctaggatgaattcttagaattggaattactggaccaaaaagtatgagcttttaagaaaaaaataatgaatgtaaatattgacaagttgttttccaaaatatttttttgacttggattctcataagctcttctttacccatattctctgtagcactaggtattgtaatctttttataatctttgccaatctgatacatgaaaattacaatttatttttaaatctgccttatcttaatgatgactaagaatcctctttatattttgttgaacctatttaattatgtaattacgatattctttcttacagttaggggctattttctattcagcactgtaaatttttacaaagctcccatcatgtgactagttgattatgttgaattagactgaaaacaacaacagcatttgatatcacagaatgtggcagagaaaatgtaaacatgaaatagtttaacagtaaaaagtttcctgtggcactagttttgagttacactggcgctggctcctgatgaataggatgaattagctacaaaatgtacccataggtaattgagtaaagctaagtgttagctagagttgttttgtgttatccacttgaaaactagagaacatcagccaaaaatcaattttggttttggcataattaatgctgctctgttctcttgagtagtacagtaattagaaatatggctcagtgattccttaatgtcactactggtttgtgacagaaaaccacgacactggcattaagaatgacaatttcctccttacttgcttcgggaggaggcagctatcaggaattgaacaaagaactatgacatagctctctttcatgatgtagttttagctagaaatctgatctgtgtagagacagtttcaaatctgattcttccagagctgttagaatacagactttataaaaactcacagcactagatttatgctaccctcctatatcttggctcatggacaagctgatgatagatgaaaaaaatgctgcagaaacttgtgttccaagatgcttatcaaagtatattaagaggcaagctgagaaaaacaaaaaagtgttacctactcaaccaaactctaggatacttgtttaagaaagtgaaagaggtttctttcgtgtaagacctcagtctttaatataccaatgtgacatgaacctagttttcagtgtttccccaactcatttgacctggcacccaatttcctatagtgaatatatgctattttccagccacccagtgtccacttttctttttatatctagtggggctatgagcaggggtcccacactaccacaactgagggacaggccaatgctccaggctaaaacaactggaagctgcagactacaactgggagtacaaagagcaatcaattgggactcacccatttcagcaatggaagacaccatctcataacattcctgtcctgatattatcctgttgtcactgcttctgtgccctctggagttctcctgctggctttctatcctgggtatctagctaggcttcccatcaattcttagagctcctgatatccttctactaagttccttcttgcctaaattaggcagagagttttcagttgcaaccaaagactcacactttaaaaaaaaaaaatcttcttcagctcatccctcataacatcactagattgaaacaggaacaatgtatatttattgacaactaaaagacctacatggattataccacctaacacattctaggagctcaaaaaattgctgaacaaataataagtattccaaaaaacagcttttgggaagtattattttaagtcattttcttaataaggagaaagactatatataatggtacctaagagagaaatggtgcctaacacctagttgctcctctaggagtggagtaaactgcaacatatgtttgtgttgaattttggtggctattgaataaactaatgtctcttattttagagaaataaaatacttaagacaaaatataaactttaaatcaatactaaggagccatttaggaaaatcttgccctctctgaactagacattttactaggcatttaccatttaaacctcaacgccatgtgtcaatgaacaatatttagtgagccgatactatgtggcagacattgtgctagggccaggagataccctgagacactcagcttgggcagtaagagactcttccatagtcacacagatggtgagttggtggtgtaaatattcttttcctgtgtaaatgcaattatagtctttgctctatttaattatactaaataaatagctgctatttattctaaacagataatccaatcaatatagatgggcttaaaattttaagtattctcactttagtgacaaacaccttggggatcttaaaggactgttttatttattgataccagtcactgtcaatatttttggttcaaagacgctttcatattcgattttctgatagaagacaacgcaatgaaaactatcaagttgcttatgaaaaattcttaggatgacactgcacctaatgtttgtagtcagttgtttgtcattctttcccttgtcctatgctgtgtccaggactgctagataagtaggtacccagcatcctagcgtccagatatcaaaaccatgaaaatgaagcactacaagccagacagataacctccagagggagcaaacgaataaacccccaaatcctgtggatctagaagtagaaaataatcgctgaaccactgatttgagaccaatgagaacattaaggacacctcaaaatagatcagggcactgttcctagcccaactctgtggcagaacataaacctgcaagaaataggattaacatactatctttgcagtaagttaaatcctgaacttctacaaaatacagtttactccaatttagttacactcttcctgcttctggtgtcttacctccacgttggactaaggttttcaattcggtggtggaatacttacctattaaaattacccactttgctttagtgtgagtttctcagcatgttttacacaggagtgacctgaatgactcggaagtggcacttgagtgtgccaggccctggaatttaatggtatggttctgtggttgttgtctgtttgcggttttattgctgaattagtagtaaccacagtaatcacaccctttctcatttctcaggcttggggatttcgtccacctctggcgggttggttcccctgacgtttcttaaagttactgtgaatttgttctggtcagtaccatagagtgtattatcctaaggagggccactgtagggccgctaggactagaggcaacttgaacttcacaagttagcagagcaaggactccctggaacaccgagttagggccacggggtctgtttgctcagattgcccgccagccctgggaaaggagtctgggggcgagcaggctgggttcccgggtctcagtcgccgcagtggtggctacagactgcgcatgtgacccaggggccggcgacgcaggtgccggagagcgaggaggagggcggcgtggaggagggtacttccgggaccggcgggcgcgcgctggcagctcgccgacggcgggggcgggggcggggggcggcaggggagcgagcgcgctggcggcgggcggtggcgttgcgcgcggggtggcgaaaggatgtgcgcgggatcgcgggggagggggagggagcgcgcgggctagctggaggcgggagggggcggagccctgtggcgtctgaacccgccccgggggtgccaaggtgcgtctccagtctgacgcgaccgcctggggcggagtcagcgggacgtgccacctgcagtgctggctagggctttttatttactagggagcagtttccccgcgcgacagttcgggagcgcgcaggcagtcgcgcgcacacacgcacgcaggcacacacacacacacacacacacacacacacacactttcgcacacacaaacacgctaggacgctcgtcttcgctactgcatccccgaaccagcagagcgaagctactgcgggttctgttaacctcagcatcgtggggcgaagcagagccattgtgcatcaaggagaggccggtgcctgcgctgccgtctctggcacctaacccagcagaccgctcaccccatcgggtaagccagtctctctccttgtaacctgttctgcagacctgaggaagagggtgggaggctgctggtgcgccaagtgggggcagacccggagttgacatttcaggggcttgcagcccatgcagcctctgcccgtgtcgtctaacgggagcagccactactcaggttacttatgctgccagccctggagtcgctccccctttcttccctccccctgagcccaatatgtactgtgctccttggttgccaaggagacttgcttaaacatcagccgtgggacatctattgaaagaactggtttcttaaatgatgccgttatttattttgatatttaaaataaaatatacactgaggacctttcgtaatttggcatttgttaatctgtattcaggtggcggtttcattcaacttcaagaaaagccgtaattgcactatatggtatgctttaaaaaggattcgtcagatgaatttttcaacggattgtgtcttgaatcataatttactcccattttggtgatcttataaagaaagatgactgcagtttagatcccttcttcccctctatttccagttttattttgcagttcacttagtcgtgattattttaaattaaaagcagatgatttaattgtgtttccccacacaagaatgagcttctattgtaaattgaccagaacaggaatacgtttgtgaattcgtaacgtaagaa

SEQ ID NO: 117 - DNA, 6000 bp, Homo sapiens
ggcctcctttctgctcacccaggacccacttgtcctggcacagctaaatccaatccagacacctcctctggggaaccttcttggactacagggctgtcccctttctcttaaaaatagcattcatggccaggcgtggtggctcacgcctgtaatcccagcactgggaggctgaggtgggtggatcatttgagcccaggagttcccagactagcctgggcaacatggtaaaaccccatctttaccaaaaaagaaaaaaaaaaaagcatttacggagcagcaattcataagagtggctgaaacttacaaggtatctactataagctaggtgctgctctgagaattatacaaattaacccacttaatcctcacaacaatctgatgaagtgggtactattgttctgtccattttacagagaagaaaactgaggcacagagatacagtgacgtgcccaaggtcacacagccagcaggtagtgggtgagggatgtgaaccctggcttcagagactgtgttcttttcactgtgaccctctaagattaactacaatcctctagggcagagccatggcctgtcttgaacagtctgtgagtttagaacggtttttactttttaaagggttgtagaaaagaaaaagaaatccaacaaaaaagacagtgatcttatatggcccaacaaaacctaaaaaaaagatttaccatctggcccttgataggtctgccaacccctgctctaggtacatgaaaacaaggtgcctgggacacacaggcgcctgcaatagctactgaatgtatgaacagcatgtccttcagtcttcttctttttttttttttgagacagtctcgttcagtcacccaggctggagtgcagtggcaggatcttggctcactgcagcctccacctcctgggtccaagcaattctcctgcctcagcctcccaactagctgggactacaggcacatgccaccagcccggctaatttttgtattttcagtagagatggggtttcaccatgttggccaggccggtctcaaactcccgacctcaagtgatccgctcaccttggcctcccaaagtgctcggattacaggcatgagccaccacgcccagcctcctttggtcttttcaacactttttttttttttttgagacagagtttcactcagtctcccaggctggagtgcagtggggcaatcacggctcacctagctcaggtgatcctcccacctcagcctcccaagtagctgggactacaggcacacaccaccatgcctggctaatttttgtattttttgtagatgcagtctcgccatgcatgttgcccaggctggtctcgaactcctggcatcaagtgatcctcactcctcggactcccaaagtgctgggattacgggcatgagccacggcaccgggccaacaacctttgaaacatatataatcatttacttgccttctacggatgtggaaacgggcacagagaggttaagcaacctctccaatgtcccacagccagtgcaaggttgggccaaatttgaacacagggcagtgccgtgagaagcccttggtctgaactacacttagactcctcttctttggtaataaccacctctgcccgcctgtgctgttcattacctttagtagtttctctacatttgttgagcacctactgtgtgccaggtactggctaggctggaagatgagagagggacagtgggatgaggtctcttctagttcctgccttggagtgtgatcctttctcttcatataaatgtccacttactcatcttgccctgagcctacctggtgccaggcacccgctgggaacaggactgtgggaaataatgggcgcagcccttctgccccattggtgctcacacccatcccttcatgtgcatacacatgacattcagtaatggaaacggcacaggccttggaatcagacagtctcaagtttgaatctcctggctcttgtactcacaagctgtgaggtcttggtcaagctgctttctctctttttttgtaaagatgggatctcccttttttttttttttctttttttggagacagagtcttgctctgttgcttatgatggagtgcagttgtgtagccacagctcactgtactctccgccgcccaggtttaagtgatcctcccacattgcctctccaggaggtgggaccacaggtgggcgccaccaagccaggctaatttttattttttgagacagagtcttgctctgtcacccaggctggagtgcagtggtgcaatatcggctcactgcaacctctgactcccagtttcaagcgattctcctgcctcagcctcccgagtagctgggattacaggcacatgccaccacacctggctatttttgtatttttagtagagacagggtttcaccatgttggccaggctggtcttgaactcccgacctcaggtgatccgcctgcctcagcctcctaaagtgctgggattacaggcgtgagccaccgcggccatcctaattttttaattttttgtagagacggggtctgcctatgttgcccaggctgatcttgaactcctgacctcaagcaatcctcccacctcagcctccctaagtgctgggtttacaggcgtgtagccactacaccaggcctttgactatttcttaaccctctaggcctcagtttcctcctgtagaaaaatgaagatgacagttgctggtggtgttagcacaacgttggtgtgaggattaaataataaggctcgtacagctcttagcatggagcctggcacatagtaaacggtcaacaaacacaaactggccgggctcacgcctgttaatcccaacactttgggaagcagaagtgggaggactgcttgaggccagaagttcgagaccatcctgggcaacatagggagacccccgtctctacaaaaaatttaaaaattatccgggcgtggtggcgcatgtctgtggtctcagctaccggagaggctgacgtgggaggatcgcttgagcccaggaggcggaggctgtagcaaggcgtggctacacaactgcactccggcatgagcaacagagcaagactctgtctcaaaaaaaattgttttaattcgtttcccagaggtttggaggcgtcacactgtctcaagccacgcagtctggcctccccttaattcaacctcccaagaacgctccaaactctcaaagtcagatcttctgcacccgcacttttcattgggcgaaagggagccaggatccgccccacgagcaggaggcagccaatgagagacgcgcgaccaaaacccggcaggaaggcccgcaggctccagccccgggatcccaaggctctggccgcggaaccctgagcctgacaagccccgagacacgtgctcaggccggcggtcccaagaccggtcctcgggtcggcagcctccctccccacactctgcggagcccaatccccagctggggaaactgaggcctcgaggcgctgcccggagccgggtctcgggcccgaacatgcgtcccagccccacgcgcctaccttccgggcccgggcgtcatcttccgcctggatctcaaactcgccgtcctccgagtcgctgccgcgggcctgggaggccgcgcctcggcgcttccggagccctttcttcttcctccactgggccatggcagctcgcgaccgaggtccagccgccgggcccttgtcggccgccattcgggccgcgcgctgggaacgcagaagggggcgtggcctgaggagcgcaccaactgcgtgggggggggggaggtgcggtgaccacgtgacctccgctgagctttcgccagtgcctgcggccctcggcggcctagtacacacgcacctgagtgagtggcaccagaggaccctctccatgtttagggacctcctgggcctcaggagcgtggcgcccgcccctgggcggactccccccatccgcgggcgcgaatggtccgggccgcgtccgcagtgctgctggctgctccctggttgctgggtgcaaagtgctgggttctgggtttctggattcgcgggccgttcacacgtagcctgtgccggctcctcgggtgagtccgtccgcgcgcggtgccccgggacggcctaggctgccgggggtccggggccccaggcattccgggctgcagattgacggggatcccggatgcaccgcgcgcccccgcgccctcaccgacgggtccagacctggtgggaagaaggtgcggggacgggtccctgaggatcccgatgcctacgagccaagatgctcaggtaggagaacaacccaaaaatgcagggacctcgggcactttttaatcgggtcattgatttgggagtcgcagaatgtggggcggtgggggcggcggtgatctcccgatagcagtgtagccaagtacacaagctctggactcagatttcacttccaccgttttagctttataggtgtgacctacacatgtgacttcacctcagttttgtgatccgtaaaatggacaaattcgaagctacttcacagtgctgttgagaggattaaatgaaacaatgcttgtaaagctctttgcaggaggtaggcatgggatccacgctggctgtcattgcccccacccccatcagtacacataggaaagtgcctgtctcccctaccaccatagtgtgttttctggttggtgcctaaatagacacaggtgtcatctctccttcaccgccagagtcattctgtaaataattgccagtagcccccctttcaccaccattatgacaactaaaaaaaagccaaagaaatttccaaaatgccccctgaagttgacagctcccctttgagagactggttgagagagaactaaacccttgggatgagaacttcagacactaccggtcttcctccattagcacttctgtggctcaggggtgctactctgacctcctctcacagggagcctcggaagcagggcctggccggcagagcacacctgctgtcaccagggaccacaggcagcatgaagacccccgtggagctggccgtcagtgggatgcagaccctcggccttcagcaccgctgccgaggtggctaccgggtcaaggccaggacgtcatatgtggatgagactctgtttggcagcccagcaggcacccggcctaccccaccggacttcgatccgccctgggtggagaaggctaacagaaccagaggcgtgggcaaggaggcatcgaaggccttgggggcaaaggggagctgtgagaccaccccctcaaggggcagcacccccaccctcacaccaaggaagaagaacaaatacaggtaatggggtagggagatgcaaatcctgtactcagtgcagccacctggattccagttacagctctggtgttcacctgctctgtgaccttgggcaagcatcttgacctctctgagccagtttactcatgtggaaaataggaccaattattcctacctagggggattgttgatggattaaatgagagaggggtctgcagtgcttcgcacagtaacctaatacttagaaagctgtcaataaatggtagtgttgatggttgtgatggtgaactccctatccccaaatgtcacaaactgggcatctgaggcccagaggagtcagctgaggcataagatcacagagaaatttgcataagcttattaatattaatgtgttcgatccttgaaatgacatagatgtggtgtttctgaagtcattttgaaaatgggttttggccacatggggtagctcatgcctgtaatcccagaacgtttggaggttgaggtgggatcacttgagctcaggagtttgagaccagcctgggcagcgtggtgaaactgtgtctctataaaaaatgcaaaaattagccaagtgtggtggtgtgcgcctgtactcccagctcccgggaggctgaggtgggaggatcacttgagcctaggaggcagagattgcaatgagctgagatcacgcctctgcactccagcctgagtgacagagtgaga

SEQ ID NO: 118 - DNA, 6000 bp, Homo sapiens
ggtttttgcttgtttgttaatatctgtgacactatgagaaactgcttaggataattcatcttgacctggaaattcttatttaaaataacctataggagaacacatttcaaattaattttcaatttatttacacctcttgagaaatattacagttctttaattggaatagtccttaaaatctgagatttcttaaagccattggatatatactgtaccatggctgggtggagcaaaatttaacttaaagtttcagcagtaactacaggcctcaaaacactagagataatgcttgaattgacttgaactagtaactctaggcatctaaagagcaaagtaaatatgcctgtttggtttctagtgttttcactttttattctgaaacaatctcaaactaacaaaaaagttgtaagtacagtacaaaggacctttttcacaaaatcattatagagtaagccgcccattttttctgaatactttgagtattccctgaaaaggaggacattctctgatgtaaccaaaatataacaatcaaaatgaggaaattaacttgttaccatctatttcccagacaccaattttgtcaattgtttcaatgatgttctttattagaaaaggacctagtttagaatcaggcatcagatgtattatcattctctttatccacctctaccctggaatagttccttggttcaccttggaatagagacttgatctgtctttcacaatcttgacacttttaaagattacaggctggttattttctagactttctttatagattggtttggtgttttctctcaactggcttcaggatatgcatctttggcaggaatatcatagaagtaataatacattctctgcatcctaacagaaggcatataaattaaatttgttctgtctcattactggtgatgttaactttgatcacttgataaagttggtgtctgctatacatctccatggtagagtcaattttattttacttgcaatcaataaatattttgtaactaataattatttctcaaaccttcaggcatttatttgttctgtctaagattcatggatttctttatttctcaggaagataatctgtcactgccattacttattttgatactcaaattgtcctacgggttgtcagcggaagctgcttcaagcaagcttctacagtactttgacatgtctccatcattctttgaacacttccttatttctgagaaaacaagaggtttttgttatcttgtgttttttctgcttcatccctgaaatcaaatgatttttccaagaaccctagctctttttagtgcagaacattattgagaaactgaaatctgggagctagatatgttcaattgctaatctcaggcactgagacactgagagtgaaaagaactacaaaatacataggtacacacacacacacacacacacacacaggcatgacatttatatatatttatttctatatcatctattcatatatattaaaaactagaaactcatattcaaacctccaattcaaatctatcaccacagcttcctccatttccatatttgcaactcccttctctgacagtgagaaatctattctcgttctcctcaaatatttacttttttgcattcatccttctgtatgtaactaatctggctgcccacacacactagaagctctctctgcttaaactgtgatacctcaggctgtgctgctgctgccatcatccagctcccacagatactcaatttgttgttgatatgatttggccctatgtccccatccaaatctcaccttgaattgtaatccccataatccccacgtgtcaagggcagccccaggtggaggtaattggatcatggggacagtttcccccatgctgttctcgtgataatgaatgagtctcatgagatctgatagttttataagtgcctggcgtttcccctgcttgcacttactccatcctgcccccctgtgaagaaggtgcctgcttcgcccttgccttccaccatgattgtaggtttcctgaggcctccccagcaatgtgaaactctgagtcatttaaacctccttcctttataaattactcagactcaggtatttcttcaaagcagtgtgagaaggaactaatacaggtgttttgacatcctatgacacacactgtccttaaggatgtcctgatcacactattcagactccaaccccatgctcaaggccctgtgcccccttccccagttcagatgacaagcttcctcagctctgcctaatgggggagaaagaagagaagaaaaagggagggagggaggagaagaataggtccctacttattttaagggccaaataaatatatttcaccgtaaactaccaaaactcttactgtccctcacattactggaacattctaatttactcacctaaaaattgacgtttgcttcaaaaaagtaataatactaaaggttatatgtaaccctggcatattaggaccaatattctatatattcagcaaatatttcactacagcccataaaactgttgaaactcaaaggaaagtgaatattgtgtattatacaatcaaatttaaagcacaaagtttggatgatgcaagctcaaggaaaatttgggcatcctacacatttggtagtgacattatgtgaaagaatttcgggattaattttcagctgatagagttggaaaaaaaagtggacgtatagggaaaaaaatgcaatatagacaaccgatactaccaggcactagctgcttacactgccatacatatatagatgacagttaattgtctctctgaaagttctacttaagcatctacagctactagcaattattttctcaagaagcacattttatatggtagcactatttatagtaacagcattattagtcgatttcaataacacccacttcaatcaccaaacggagaattttctgcccaaaaaaaaaaaaatacattagatggccttttctttttctttgttctcatggatggttttcagattaggtttgttttttgttgttgcttttgtgtgtctttaacatttatttcagcagagcccaaacattcacacaagaataaagctctgaagtttctggcacgtaagatacgcccaagactattcctagacaccagcaaacagacgaggttgaagaagaaacaggtgaagaataatgtcttaaacatcattttagcaccctattctgccattctgtatctttataggatatgtccagtccagtcccagaaaatctactgcccaaggagttctagatgacaggttagatcaagccccggcaaatgtttgcgaaaacaacattcaactgcctctggacattgcaaagacatattccagggagctatctcttgggctcttttttaacatctctcctagaggatgagactcctttcgggattacagccactgggaaagtaaaagcaacagtagcatcaacaggttgcatcgcactcccgcgccccaggggcggtgcaggagagcgcccggagccagagccagggcgcgctgggcgcaagctggggcgcgcccagggccaatgagcttctgattggctctttgctgtgaatagactaggccgaggctaataggaccggagggggcgttcacctgggaattggcctcccccccttgccaaggacctccctgattgtatggggcggagtggggtgggggtgggggctggaaaggggaagcccaccctaactaaacggaggggcgggaggaggttaaactgaggaagccacgagcccgcagtaaagagagggcgatcgaggcaaaagggtaggtaacttgggacttctgtgccttgaaagtgttaaggattgcagggaatgcaggcgcctttcattttactttgggcaccctcccctggctgggcatttaatgaggagtcctactgtgtgtgttgaaactctgcataataccgtaaaatattctggccctaaattacactcaacggagagatttaggcagattacaatcctaattggccgcagggtgctggggaaaggggacagagagaattgggggatctggaatttggtgtgctatcactacaccgcagctctattttccattaagaaaaagatcatatgacgaagtcgaactaagagatctgaagtaaaaaatgaaaagatggagcaaaagtaagaaacatactctgagacgagtgggttttccccctttattccaacagcaatcttaaatgatggacgtcatgtagcagttatatatctatgaacatgcatgagagatttataaatacctgcatacataaatacaaacatcctattatacatgagaaatcgtaaatgcttgggcatcagaagtgggagctgtgatcctagcttgggggcagcacagggtaggcggccttctctctgctttgagtggcttctgggcgcctggcgggtccagaatcgcccagagccgcccgcggtcgtgcacatctgacccgagtcagcttgggcaccagccgagagccggctccgcaccgctcccgcaccccagccgccggggtggtgacacacaccggagtcgaattacagccctgcaattaacatatgaatctgacgaatttaaaagaaggaaaaaaaaaaaaaaacctgagcaggcttgggagtcctctgcacacaagaacttttctcggggtgtaaaaactctttgattggctgctcgcacgcgcctgcccgcgccctccattggctgagaagacacgcgaccggcgcgaggagggggttgggagaggagcggggggagactgagtggcgcgtgccgctttttaaaggggcgcagcgccttcagcaaccggagaagcatagttgcacgcgacctggtgtgtgatctccgagtgggtgggggagggtcgaggagggaaaaaaaaataagacgttgcagaagagacccggaaagggccttttttttggttgagctggtgtcccagtgctgcctccgatcctgagcctccgagcctttgcagtgcaatgtcccgcctgctgcatgcagaagagtgggctgaagtgaaggagttgggagaccaccatcgccagccccagccgcatcatctcccgcaaccgccgccgccgccgcagccacctgcaactttgcaggcgagagagcatcccgtctacccgcctgagctgtccctcctggacagcaccgacccacgcgcctggctggctcccactttgcagggcatctgcacggcacgcgccgcccagtatttgctacattccccggagctgggtgcctcagaggccgctgcgccccgggacgaggtggacggccggggggagctggtaaggaggagcagcggcggtgccagcagcagcaagagccccgggccggtgaaagtgcgggaacagctgtgcaagctgaaaggcggggtggtggtagacgagctgggctgcagccgccaacgggccccttccagcaaacaggtgaatggggtgcagaagcagagacggctagcagccaacgccagggagcggcgcaggatgcatgggctgaaccacgccttcgaccagctgcgcaatgttatcccgtcgttcaacaacgacaagaagctgtccaaatatgagaccctgcagatggcccaaatctacatcaacgccttgtccgagctgctacaaacgcccagcggaggggaacagccaccgccgcctccagcctcctgcaaaagcgaccaccaccaccttcgcaccgcggcctcctatgaagggggcgcgggcaacgcgaccgcagctggggctcagcaggcttccggagggagccagcggccgaccccgcccgggagttgccggactcgcttctcagccccagcttctgcgggagggtactcggtgcagctggacgctctgcacttctcgactttcgaggacagcgccctgacagcgatgatggcgcaaaagaatttgtctccttctctccccgggagcatcttgcagccagtgcaggaggaaaacagcaaaacttcgcctcggt

SEQ ID NO: 119 - DNA, 6000 bp, Homo sapiens
ggcctttttggcatagtgcaaaactgaaaacaactcaatgtttattaataggaaagtagttaaataagctaatccacatttgtgctgtataatattacacagccatttaaaaaataagcttaatctttctgttctgacacatccactttactgaatgagaagggcaaagatgtattttattacatatgcactgtatcatacagacatatctagaaatgtacacatcaaagtgttaacagtgactatatctgaacaggactaaaactgggaacagagactttcacttttatacagtaccttatatacttctctattgtttcagtattcttcaacaagcatgcatttcttttctaattaatttttttaggctttgatcaactgcagggccacataaattattatgggctttattcttagttcttatttttatccctatttcttaaaaatatttttgtagctgggtacggtggctcacacctgtaatcccagcaccttgggaggccaaggtgggcagatcgcttgaggtcaggagtgaccaacctggccaacatagtgaaaccccatctctactaaaaatacaaaaattagccaggcatggttgtgtgcccctgaaatcccagctacttgggaggctgagacaagagaatcacttgaacccaggaggtggaggttgtggtgatccatatcacgccactgcactccagcctgggcgagagagcgagactctgtctcaaaaaaaaaaaaaaaataataataataatttttgtaatgatctctgtagcaatcctcagaggaaagtaagacaagagatagtactaacccagtatcatagattaaaagctataggtaaattgcctgacatcatcaagcaaaacaaatgacagaactggggctaaggaatggctcttttctcttagtccagtgctcttttcgttggacatcactgcctttccagtaagggaaagaaggctgccttgatctgctcaacatctcagtactaaatgactagaaaagatttaaacctattcccactgccgaccctctgaatccccataagtcatttgagggtaccggtgaccaatggccagagggacctcttttaaataaccccagggaagaggaggttacaaatcccggcgcaagccccttcactgtcagataattccctcatattgagctgaaacctatttttgttactttgattccctggtccaagtttggccatttgaaatggcacaaaatttgaatatactctccttttctagagtatattcaagcatataaagaaagctatcatctgtgtccttttgagaatgagtgctttacctatattaacttccaataaaacatctgtaattatccaacttctaattgcagtgagtcctaacaaactgcttggcagaggaggaaaagaaaaactatcatgtaggacccctaccaaatcataaagtatttaatacaagtagtcaattgttactacagtcctctaaggcaggggtgtccaatcttttggcttctctgggccatactggaagaattgtcttgggccacacataaaatacactaacactaatgacaactgatgagcttaaaaaaaaaaaaatcacaaaaaaatctcataatgttttaagaaaatttacgaatttgtgttgggttgcattcaaagacgccctgcaccatgtgttggacaagcttgctttatggggagttacagagaaccgtgcattttttatcactcctttgttagatgtcaccagatcaaatagctttccagtgtaaagaacaggcacaaagttaggatcagatgcttctgacaaagtcttggctttagatggctactcatagcagatgcaagaatctgttatgatcacagacaattattagctattcattacacagatgaacaatcaaccgaatgatttttcctcagtaaaatattttgtgttgtttttgtcagaaccttcaataatgaagtggcctggtggtcctcctgattaacaaatgagactttttcataacttaaaagagggaaaggaattaaagataaaaagataaaaatggtcaaatgcaacttagtgactgaacctgagacccaggaaaacatttaggaccagaatgacatagttattagataacaccaagaaaatgcacaatgaaaagtacaagtaggagaagctacactatagttaaatactcattaaaactgctttttacgaaaacagacatgaaaaacaatcaaaagcaaatgtttgtgcacaaccttagggtaagaatacacaagacgcagacatctatttggaatagtgcagctttttatttttattctggtttacctattgataatgggagcaaacttgggaaagtcttcccaaatgttgcttcaggttttcattctgaaaaacctctcaacctaagtgggggaaaggagagcacttaatttaaaatattcttccttattctcccttactgagctgtgttgcccttcaccaatatttatcataatttgtatttacttatctttctgctttctttttgcccatatcacctagaaactataaactccgtgaagggagagtcagctcttttgaacacggtatacctatgaacacagggccttgcacacggaaggtgcttattaaatatttgtagaataagcaaagaaagaaagaggaaaggaaaaggagatcacaggttaccaaaaacagatgactttgctttcccaatcaatgtcgggaaattaatcacttattgaacacttactatgacctaggccatttatgcataatcatatagtttcgcctcccaacaatcctgacaaatttgcatttgagaccaaagtaaggctcagagaaattaaatattatacaactcactcaagccgcacacctagtaaatttgagctccataacttttgtgaatattaggtttatctgagtgatgctggcccctaatatgcccctgttgtcaatgattttctctccatacagctatggagacagggagagagattcacagcaaagagcaaattagtagttttttgtttttgttttttgagacggagtcttgctctgtcgcccaggagtgcagtgatgtgatctcagctcactgcaaccaccgcctccagggttcaagcgattcccctgcctcagcctcccgagtagctgggattaccggcacccgtcaccacgtcggctaatttttgtatttttagcagattgggagtttcgccatgttggccaggtcgttctcgaacttctgacctcaggtgatccgcccaccacctcggcctcccaaagtgctgagattacaagcgcccgccaccacgcccggctaatttttgtatttttagtacagatggagtttcgccatgttgaccaggtcgttctcgaactcctgacctcaggtgatccacccgcttcggcctcccaaagtgctgggattacagcactttgagccacggcgcccggcctgcaaattagtacttatatacaacccaagtcctctggctatctagacagtctgaattttttagcaggactttacagaagtcctgctaaagataaacagcaaaacaagtatttttacattaaccaaatatttttatcttcaaaacaattgttacaaaacagaaatttcacacaatactagtgaggacagcctaagacagcttaatcattcacatttcctctatgggcttggggtttttggaaaaaaaaatcgtagctgcataaacttggtgtaaaatttgaaaaagccactcatgccacaatcctcgtttccctctgctaatgtgatccagatgggaacgctgaacgacgtaactgccccatctgcaccttagatttcattagggtcctgttcactctgtgcaattagttaagtgtgctgaccatcaaatatttaccaggagacaacatgtccaggtcaaagaaagggcgtgagaataacattttagaaagagttgcactgcagccaagactaactctgggctgcggtccacactcgccccagccgactcctctcatttcctctctcccctctccagtgagccattccttcctggagtcaaagacggtgcaacaggcaggttcctaccttggtctgcacacttttatcgaacttgtcatttttgaagctaaacgtattctggtgcttctgaggtctggaacgagccacgttgcctttctgggagctcatcgccgaaatcaaagccacccctcgccgggagcaggcaaaaggatgaggggaaagaaaaccaacgaactactcccaggaattgacgcttctgtcaatgacccggaagaaacaaacgcagcctttccgccccggctctgggtcagcccacgtgactcttctgggaggtcaaagagcatcgctctgccctccctgctgttaagccaagccactccacgcggcgcagcctcgacccctccggctccgcgcagcctctttctcaaacccggagaacaagtcccactttcttcgaaatgagaattcccccattggcccgaatgtgtagtccatcaaatcaaaggggcggggaacctttgttcctattggttcttcttttccgcaatccccgcctcctgctgagcgagctcagcctctccttgagctcagagcgcctcccaccctgccgggcggcctctgattggtggaagtgaggcaaggctgggctccgtctctccccccgcccgctagtaggctggagccggggtcagctttggcaccttcctccagtcagtggccaactcctggctcagtggggattgtgctcgtcccctccgttcccctccagtcttcctcccgctaccggaacgagcctcgcgcttggcaggctgaggaggagcaaagaaagcaggattaaagagaaggaagacctggctaggtctgggtggcgtctgcagtgccagaaagggaggcggtggcggcggcggctgcgaccacggccgcgcgggacgtgaggcccgagagcaaccgacgggcagcggcggccgctccagcgccccgcaccggggccgttagtcagcagaacgcgagctcttgtggaggagcagggccggcgcgaggcgagactcgggagcgtgagcggggcccctggggcgccgccgtccttcttcgccccggcgccgggggctgtagccctggtccccgctcctctgtcgggccagtctgcaggcggagagagtcggacggcgcccggagcgcggatctcgccttgtggaggacagcgcgtcggctgcggttctctctcgaccccttctgcccggcgcttcggcccgggccgctcaggtgcaggtgcgtgcggcctcggggtttggggacgccgcagcccggctcggggagggggcgctaggccgggagccgcagcgcgggagggacgagcccgggccggcggggggaggggagcgggaagcgtctttgttgttggcgaccgggatcccttctcggcacaggggaaaggcggggaagccactcctcatcgggtctgtgtttttgagaggattctctgatggttgcgtgaaggggagcggtaggacagtccctgcggtccgtggagcggccggagtcagggggtgggggagggaggaccgaccgacactctaagaaggtctttggtcctcctcggtgaagagaagggttccatttcatttcctttgcttttctctcagtggatgaaaagatggggtcaggttcccattcccctcactggcgcactgagagattcgcgggtgcctaaaagctttctcctgaatgtccttatatctctgtcgggcgcgattttagattgaatctgcacggggcttggcgatttgtgtattccggtggggctgtcgtagggttctttttctttagatggttgggctttaatcttatttgttttcgaactctaaggtaggcttatcaggaatcgtttttgaattggaaaatttaaaggttttgtttgggattttttttaaccccgaaacaaagttatgtcaaattagattgtactgtgtg

SEQ ID NO: 120 - DNA, 6000 bp, Homo sapiens
atgtctctctcctgctccagccatgtaagacatgcctgcttccccttcgccttccaccatgaatgtaagtttcctgaggcctcccaagaagcagaagccactaaacttcctgtatagcatgcagaactgtgagccaattaaaactcttttctttataaattacccagtctcgggtatttctttatagtaatgcaagaatgaactaatacatctgctgtattatttattgtatgtgaaaaattaccacatatgtagtgacttaaaacaacatgcatttattatcttatagtttctgttggtcaggagtctgggcacaatctaactgggttctctttcttttgtaatgtcatgtaatcatgggaatgactttccatcacatttaccgtgtatttttggtgtattaggggtcttcagagaagcagaaccaataggatggatggatggatgattgatagataagatagacagactgatagatattataaagagatttattataatgaattgactctcatgggattatggaggctggcaaatccaaaatctgcaaaaccagtgttctaatttaagtccaaaggctagaagctgctgtagaacaaggaaatgtcaatgttccagttcaagtccaaagaccactaggatgctgtagacggacagccaatatcccagttctaaggccatcaggcaggaaaatcctcttactaggtgggtggagtcagccttttgttctattcaggccttcaactgattggatgaggcccacatacattagagagggaaagctgctttactcagtccaccaatttaaatgctaatctcatccagaaacacactcacagaaatacccagaataatgtttgaccaaatatctggataccctatggctgacctattcaaaataatacataaaattaaccatcataattggttgaaaggtacaggtcccacccatatctgaagaagggaactacataagggtgtaaacaccaggaggtggaaatcataggggccttaaaatctgtccaccacacatactgttattcattacttctaattttattgcactgtgaaatttattgagcctccctttaagatctaatacacagtttatgtttttactttaatgtttcacatgtacctgaaaagagaaaggacatgtattcactgtttgatggaaacgtatatgagttataaatatctaatggctcaagtttattaattaaattgtacagaccttgtatatttgctttctgtgtgtatgtgtgttgggagaggagaggaagtatctactgtctacttgatctattggatactgagaggagccagttaaaaatctccaactataattctgatttatctgtttctgcctaaatttctgttagctgctgcttaataaatattaaagctgtattgttgggcacatttatgacctcccttatgaactttctatcttaagttttattttgtcaggttttaaaattactacatgagctttctttggttcacatttgcactatatccttttcaagccttttaaccttttagtgtctgttttacacaagtttcttgtagaaaacatattgctgaatcccttgctttcattcaatttgaaagactgtttttcttaattggttagtttaagccacttacatttattgtaattgctgctctatttaggaggcagcatagaatagctctaagtatggttctaagtatgggttctagatccagaccacctgggttcaggccttggttctgccactttctagcaagttagttaatctcagtttcatcatctataaaatgaggatgatgaaagtaatagtaccttcctcataaggttattatgaggatcaaataagaaacacccagaaaagtatctggaacatattaggtacactgaaagtaaaaattattattagtaattttatttctgctatcaaatttcatatattctaattattgcactttctttttattcctttttcctctgctctcttgcctttcatttgataaaattttcttccactgctttaaaagttacatgttttattcttttttaacggtagttacccttaagacctacattcacaaatatttatccctattgatttattaaagttaacaatttttttcgtcttcctcccatatgatagtaatttaacccagtactactctaagtactctaagtagtactgggttacttatctcatccattccagaatgagatttgagcccacatgtaaatcaacacacagcttccttcattgagaaagtcttgctacgaaagtgtcagctgaatcaaagagtttgcttatgacatagctgatatgcattctggtacaagctccttatctcttagagaacaattaagttttgtgaaccaccctttgaatggcactattttagatcactgtcctatcattttggcctctcattcctgagtcccacacccctcacaatattgatattgtctataattttaggtctgaatcattataaatacactgttctttgtttttagacttttgaaaagagtttttgtaagtcaggtttaatgaaatacagtttacatacaataaaattcaccttttctagtgtacagttctacaaattttgacaaacagataccactgggtcatcagtaccattctcaagataatggaatatttccatcacttcagaaagtttctccagattcccttcacccccagcacctgacaaccattgatctattttctgccttttccagaatgtcacataaatggaatcatagagtagcttattatatctgactttttttcacttaacatgcatttgagatcatccatgtttttgcatatgtaagaagtctgttccttcttaatgcttagttgtatttcatcgtatagatgcatcacagttatgtatagccacccaccagttcctggacacttgggtggttcctggtcttttttctaacacaacaataaattcagcctaaatatttggccactctcatgctatatctattgtatcatctcctgaatttgtttctcttcttgcttgattatgtcctccaagaatgtcattcaaatgaatctttcataagaatatttttattattaatacattctcacattctaatgacaatatggcttaatagaaaataagttcaaagttatgcttttaaatacttacatatagaaacattttgcttgagataaaccttttcaatctgaaggtttttttctaccttgaaatttatctccattatatcttcaaatatttccccttctctgtttttatatttcttcctttctgttctagttttaccctagatataagctagaaaatttacaaataagctaacttgttttttaaaacattttctactgcctctggaggtttgctgaaagtgctcttccaattactaattcatcgtcagctgcatcttttagactattgcacattactaatacgtagcatcaatattcattctaattattatttttatgcttaatatgttttagtttcatattttttcctgattcatattgctaatatcataactcattttaaataaatttatcatgcttatttaaaaatcttggtccatctgctctactgatcagtttcagatggcatatgttattcagttgtggtcttttaacagtagttgcactcctccagtgtctaattctttgtcctatgaattcatgttcccctggggtttcacctactctgtctgataaacatgcatccaggaaggcccagtgagtttgcagtgggagggtggtgtgagcccagaaggaaatcgctggcaccagagaaccactgtctatcattcccagtttctcccacttacccagatctttcctccagtcaggtttctacccttagggagaagcagcacctaaaggaagcaattaacctagcaaccctaagggtggcagggggaagggtagaggcttgattgagaggaggtggggggaggtcggcctgcagttttttttgtttttcgttttttaaattcctcaccccaacagtgcttttgcgctggtctgacactacctggaaaactatgccaccagtcgcttcagtggacactaccatttcaattgcgaagtcaggcaatgattgtcctaaggcaaggtgggagagaagtcagagtaaaccacctcgagagcgccggtctcccggagtgtctgggttcgactcctgcctccacaacttactgggtctcctcgaacaagttgcatcaccaatggccgtgcctcagtttccctcctccgtagattaggaataacaatagcagtgagaacagaatccagcacacagtaaatgctgcttacctgtttgctatgtggaatacgccactacactgttgctcggccctcaggaagggtctgctgagactttctacttcctgctcagggcagaggccgaccacccgcccaaggtcgtggcggcgccggctcagctttagtcgtcaaagtgcacatcctgggagccgctgcctcgaggtggttgaggcgagagggcagggaagcgtctgagcctcttcctcccaccagagcaggaccccagctgacagcgggtgagctgggcagaaacccatgccgggaagaggcggacccagtggaccgcagcgcccgcagtcgccgggccaggcgcagaggcgaacgggaggcggcgctgcaccgtgcccgcccctccccggcccggccccggctccagccccagccccagccccagccccggccccggccccggctcgcgggcgctgcgtctccgcgtacaggaggcggcggcggctcccagtcaccggcccccgccggcgagcgcacgatgcactgcctgggcgccgagtacctggtaagcgctcgcagcctcggccctcgggggaggagccccggggaagggtcgagtcccccgccttcacgcaccttccctgccggacgcttccgcctttcccgcgcctcggggatcccgcccccgcttagtaccttggggccacctggcggggaggaacctggaccctgctccagtgctggggcggaggcgggggagacgcgggccgcggggcgcaaacttggggtcgtcctcaggtgcacctccaggtaagcacttggcggcagggggcttaacatccgctccgcgcagagcaggtgtttcaaaggctgtgtgaaagagcttcaggtggccacgtaaaaaaataatattaattttaaaaatttagaaaaagattggttactttggcccctcttcgagtagatttgggttcggtttccaggttgagtccacctgtttatcttctttttctcaactctccctttttctggaaggtttctgcagaaggagcccctaggcaaagggagtggcgaccccagatttataggaaatgcacagatacggcatggttattcctgttctttctcttttggactggtttggtaagtgtgggtgcttggtaggaaagaggccagagtgtgtgtgcacgtctggaaataactctgtcccaaatgtaaatcgtagttggtgctgcagtgagagacttctgccgttaacccacaataaacatcagtttgtactcgggagaattcttgtcctagactcgctagaaaggctgtctttttgctacaggccatgttctaaggggtgactccattaggaaatgggaattaacagtttgcaatgtgattgctatttagtaaggccaatgtgtctccttttactctccgaacttactgaacagaagttcttttagcacctgccacacccccaaatcaaatattcctcaagcttttggtgcacctttaacaaaggaaaagccagggtaagcctagaaataaactgcatttcctttagctgaacatcacacacacacgcgcgcgagagatatgttgtgtttagcagccaacactgttaaccatagctaacaaggaatgatttttcccactctaatttcgaggtatgtatgattgctggtaaactccatcaggctatgcggttataatc

SEQ ID NO: 121 - DNA, 6000 bp, Homo sapiens
agtggatcatgaggttaggagttcaagaccagcctggccaagatggtgaaaccctgtctctactaaaaatacaaaattagctgggcgtggtggtgggtgcctgtaatcccagctactcgggaggctgaggcagagaattgcttgaacccaggaggtggaggttgcagtgacccaagattgtgccactgccctccagcctgggcaacagaacaagactccttctcaaaaaaaaaaaaaaaaaaaaaaaaaaagtctgggcacggtggctcatgcctgtaatcccagcactctgggaggctgaggcaggcggatcacctgaggtaacaagttcaagaccggcctggccatggtaaaaccccgtctctactaaaaatacaaaaaattaggtgggcgtgctggcacatgcctgtaatcccaggtacttgggaggctgaggcaggagaatcgctcgaaccccaagaggcaaaggttgcagtgaaccgagaacgcaccattgcactccagcctgggcaacaaaagcgaaactccgtctcaaaaaaaaaaaaaaagattgtgcacttgaacacggtggttgatgagaacttaatagaacccagtttataaagctggaggggaaaccatcaaggcacagtatagacgccctgggttagcaacgcctggcagctgtgaccacctctttgccctggagagagctgtgtagagctactgcctgtagcagagggatgtcaccaatggggcttggaggtaggggacacgggataaactttttcttttttttttgagacagagtctcactctgtcgcccaggctggagtgcaatggtgcgatctcggctcactacaacctccatctcccaggttcaagcaattctcctgcctcagtctcccaagtagctgggattacaggtgcccgccaccacacctggctaatttttagtattcttagtagaaatgggttttcgccatattggccaggctagtctcgaactcctgacctcaggtgatccacctgcctcggcctctcaaagcactgggattacaggcatgagccactgtgcgtggccaattttttttttttttttttttttgagacagagtcttactctgttgctcaggctagagtgcagtggtgtgatcacagctcactgcagccttgatctccctgggctcaggtgatcctcccacctcagcctcctgagtagctgggactgtaggcacacaccaccaacatgctgctaatttttgcattttttgtagagatggggtctcactacgttacccaggctggtcttgaactcctggggctcaagccatctgcccgcctcagcctcccaaagtgttgggattacaggtgtgaaccactgtgcccagctaaacatctttttttagtgttattttatttatttatttatttagagacagggtctttctctgtcacccaggctggagtgtattggcattattatagcttactgcggcctcaaactcctaggctcaaatgatcctcccacctcaggctcccaagtgcctgggcctacagacacaaaccaccatacccagctaattttaaaaaatgtcttctttccttcattccttccctccttccttccttctttccctccctccctccctccctttctttctctctttccttctttctttctttcttcctttctgcagagacagggtctccctatattacccaggctggtttcaagcaatcctcctgcctcggcctcccaaagtgttaaaattacaggtgtgagccaccgtgcctggctgggataaacaccttggcttcactctcctctctttcatcaggtgaccccaaggaagccagaggggaaggaaggtgaaacagaagtctgagaaggggtgcttgtgaagtagaaggaaatcaggagggggtggtgtacccaaagaccaaggagctaatgaagaggaggacagggaatgaagtcagtgattgaatctgccaaacggacatcataggtgctcttgtcagaaaaagctcccagaagccgggcgcggtggctcatacctgtaatcctggcactttgggaggctgaggcgggcagatcatgaggtcaggagttcgagaccagcctggccaacatggtgaaaccccgtctctactaaaactacaaaaaaattagctgggcgtggtggcacacgcctataatcccagctactccagaggctgaagcaggagaatcgcttgaactcaggaggcggaggttgcagtgagccaagatcacaccactgcactccagcctgggcaacagagtgagacttcgtctcaaaaaagaaaaagagccctttcatcaatcttcccgcgtccgccgattcctcctccttggtcgccgcgtccttggctggcgtcagaaaaatggctacaaacttcctagcacatgagaagatctggtttgacaagttcaaatatgacgacgcagaaaggagattctatcagcagatgaacaggcctgtggcaggtgcctcccgccaggagaacggcgccagcgtgatcctccatgacattgtgagagccagagagaacatccagaaatccctggctggaagctcaggccccggggcctccagtggccccagcggagaccacagcgagctcgttgtccggatcgccagtctggaagtggagaaccagagcctgcgtggcgtggtacaggagctgcagcaggccatctccaagctggaggcccagctgaacgtgctggagaagagctcgcctggccaccgggccacggccccgcagacccagcacgtgtctcctatgcgccaagtggagtccccggccaagaagccagcctcaccagcagaggatgacgaggatgatgacatcgacctgtttggcagcgacaatgaggaggaggacaaggaggcggcacagctgcgggaggagcggctacggcagtacgcggagaaggccaagaagcctgcattagtggccaagtcctccatcctgctggatgtcaagccttgggacgatgagacggacatggcccagctggaggcctgtgtgcgctctatcgagctggacgggctggtctgggggacctccaagctgatgcccgtgggctacggtatccggaagctacagattcagtgtgtggtggaggacgacaaggtggggacttacttgctggaggaggagatcactaaatttgaggagcacgtgcagagtgtcgatatcgcagctttcaacaagatctgaagcctgagtgtgtgtatgtgtgcgcgtgcgtaaggccctgccacgattaaagactgagaccggcaaaaaaaaaaaaaaaaaaaaaaaagaaaaaaaaaagaaagaaagaaaagaaaaagaaaaagaaaaaaatgttcccgtgaaagggggccaagaacccagcccagttggcatggctggaggaaggaccaggagatgatgcagtggggaaggtgctatagagaaaactttttcccagaagtatacagcttatttatttatttatttatttatttattttgagacagagttttgctcttgctgcctaggctagagtgcagtggcgcgatcttggctcactgtaacctccacctcccaggttcaagtgattctcccacctcagcttcccgagtagctgggattacaggcgcccaccaccaggcctggctaattttttttttgtatttttagtagagacggggtttggccatgctggccaggctggtttcgaactgctgacctcaggtgatcctcccgcctcggcctctcaaagtgctggcatcacgggcatgagcctccatgcccggccggtaactgtatttttccttctgggcaccccagaatggtggggttgggggcaggttctgggaagagtctgcttccattagggggaaagtggaaaacgtccctaggggagggtggcccgcgcaagggcatcgatcctgcccttgaaccgcatgatccggccccagctgctctttccccctaccctggacgcctcctgtttcctgtctgggcctccccaggcgcccgggcccaaggtgaccgcctttcaactgcaaccgctaagctgcgcccacggcgcactgtgtccgtctctccctcctccctcaatccgggagtgcccttggcagcggacacctcccggatttttccgggaggagaggggaagccgcttctcggcttggcgtgggggcagtggtgcgcggctgggaacctcgctgagcccaagcattggtagggagaccccagcggccagtaaggcggctcctggcgccccctcgggccggagctgtgcgctgcaaggctggatcggagggagggcccaggggcctgaggagtcgctgcctgccggctggcacgaccaagcgggactgcccgggtcccgaaaatacggcttcgggggacacctcaccaagcggctagtggttcagaaccccagtccgacgcgctgctgggcccagtctccgggacgatgacggggacatggctctgaaaaagtgccagggtgcgctcagtagaacccagcacccagaatggccccccagagagcggggccgggtctagggaagccctcttccaagaagtcccgtgccctgaggtgactgggcgcgctagttgatgaaactgagtgccccaccgaggcgcccctgtcccgagggcggggccagggcggggcgggagtcctcctggcaggtgccgggggcggtgcccggccctgcccccgggggccgttcctggaggccagaggcgggtcagagaagccgccggtgcgggcgacgccttggaacccacggccgccactgccgccacaggtgcctcacagtgccctctgtcctcgctctgggaatcaaaaccccggttgggaactgaggcttccgaactgcttccaaccctggacacgaaggcccccaccggccggagaacgaaaccctggggtcgtctgaagaggagggccaggagtccccagggccagacagcgaagccccagagctgctgcggagctgaacaccgaggtccccaagccctccgcaaaggacgtggagatcctggagcaagagagcgaagtcctcgagccatcagtcgagcaggacgcagagagccccgggctgtccacagctgcgggctttgagagtcctgagccaggcagagacgaccctgggccgtccgaagcgcaaagggcggaggtccaggggcagcatccccctccaggccctaagacctcctcctccaggtcaggctcggaagccccccacctgcgttttccgccgtgccccgaggctccccagcgtcccccggaggagcggttcatggagacgcccatcgagcgcgaaatccgccgcagctgcgaacgcgaggagagcctgcgccggagccggggcctgagcccgggccgcgcaggccgtgaactcgtcgagctgcgcgtgcggccggtgctcaacctgccgggtcctggccccgcgctcccgcgcgccctggagcgggcgcgggcgggcgcgcagatgcagcgggacatcgagcgggaggcccaccggcaggcggcgctggcgcgccccgcggtccccgagccgcgcgcccggtcgccgccgcagccgctgggcgaactcaagcgcttcttcgaggccgcggcggggagcggctcctcggcgggggcgggggacggcgcgggcccgcagaggctgccagagcctgggggacggccgcgctcggccgtgcagggcgggtgccgggtgctgggcagcgccccgccgcctttcactccgtcactgctggagcaggaggtgcgcgccgtgcgcgagcgcgagcaggaactgcagcgccagcggcgcagcgtctatggcaccgcggagttcaaggagcctacgccgagcctcaccggtaagccgcgggcgtagcaacgccgggacccccagggttccagccgcccccaccgattgcccaacttcagtggcccctcctgtggccctccgattctcggggtctctccctccaagctcccagaccccctct

SEQ ID NO: 122 - DNA, 6000 bp, Homo sapiens
tatgggaaattcctgtaattctgatatgacctagtgtacattatcagtaataatcataattgttacgttaaaattattgtgtgctacagaggagaggtatcaaatttccttgtcaattgtgtctttgcctatggctgccctaaaacttttagtcatccacgcacaattgttgtgttgttttggtcctctttagaaagtgtttttttttgttgttgctgttgttgttttttgagattcattatttattcttgataatgttttctttgttaaatttgtttttttaaattatactttaagttctagggtacatgtgcacaacgtgcagttttgttacatatgtatacatgtgccatgttggtttgctgcacccattaattcgtcatttacattaggtatttctcctagtgctatccctcccccatccccccaccccacgacaggccccagtgtgtgatgttccctgccctgtgtccaaatgttctcattgttcaattcccaactatgagtgagaacatgcggtatttggttttctgtccttgtgatagtttgctgagaatgatggtttccagcttcatccatgtccctacaaaggacatgaactcatccttttttatggctgcatagtattccatcgtgtatatgtgtcattttttcttaatccagtctatcattgatggacatttgggttggttccaagtctttgctatggtgaatagtgctgcaataaacatacatgtgcatgtgtctttatcgtagcatgatttataatcctttgggtatatacccagtaatgggatggctgggtcaaatggtatttctagttctagatccttgaggaatcaccacagtgtcttccacaatggttgacctagtttacactcccaccaacagtgtaaaaacgtaactattcctccacatcctctccagcacctgttgtttcctcttgaatgcaggtctccattaactttggagattgttacatgagaatagaggaaaaactttcagaactcatggagagctaaaatgctcatgaatatcaagcagaataggaattaactaaggggactgaactaatctttttgactttttgcttaaacattgctgatcttttgctttgtttttcagagccttgaaacttttcttttgagctattgacagcttttaacaatttagtatactccaatcaacaaaatttggagcatatttgtttctctctacctgatttctccagaatttgtaaactatttgtgagtattcttaacttgtgccaatacagttatttgcataagtgcagtaagaatctgttttcatttgtaacaggacacagttggagaaactgattattttaccaaggctttgagtggaaaggtgtactttcctttaagtaatcaaacctgacttatggagccaataaaagcccttgggaaaactggcctcacactttacaaagtccctgtacagggtttctgatatgtgctaagtaaagaatgtcattttctgacaggtccaggagcccctggtttatcatggaacatcaaaaagaggaaattcaccctactcataggtatttgatggtacaaatccatggctgagcttggctttaaaaagaatcttatctgagattccttctatggaacaaagttccttcaaagccaattttaaaaagcctatgtgaaaaataattattcttgctacactttatataaataatctggtcaaatataataaagcaaatcagtcctaccatgatttgtctttagtaaaaatggaaaactggagagagaaaaattgtttcaaaacttacagtccacttgttgttagatactagtcttgcctaattttttcaatttttattattttctacagtttaggctgaattctaatttttcctggctacaagtctccaaaataatatttttaatttttttcttttcttttccttttttttcctaattaggagtcactgaaaacagctgtgcttttgtaaagccctgcaaactgaagctagacaacttaaacttcagaagaaaataacagcaacctatttacacgcataagccactttcatacctgcctactgatgtatggacttcagaataacgtggcctatgtatattttccaggattgttcttttgtttgttgtttttcacccttcctccccctattttctcttcacaagacatgggagttcacagccttctaaaaattagctttcctaataacttgggacttacctgtctaggaataaaccatcctagcatgagcgatcagatgaaatctgggaccaaagactcatttttcttctaaaatgctttctccaaaaaaaaattttttttaaaaaaaagaaaagggggcaaatgtaaaggaaaatatcttgggcccccaaatcactaagttaaaaggaaaattcaagctaggaactacttaagacaaacttgcctcccattctattcaaagtcatccctctgctcattgagataaatgtgtatctgactgcctccttaggaaaggtaaatcagaaactcaaaagaatgcaaccatttgtctcccacctacccgtgacctggaagcccccttcccgcttcaagttgtcccgcctttccgaacccaaccagtgttcattttacatatattgattgatgtcttatatgtccctaaaacgcataaaaccaagctgtgctctgaccaccttgggcacatgttgtcaggacctcctgaggctgtgtcactgcgtgcgcatcctcaaccttggcaaaataaactttctaaattaactgatacctgtctcaaatttttggggttcacaaggtttagttataaatgcttcttatggagcatgattttcttacaagcgaggcaggagaatcggatctggaggcagggaacctagggctgtttcacgctgacttcctagaactaaattgaaagtaaaaccctaacttcccacaccaagtaacaaaagaaccagaggcttctccctttccaaacccccaccttttctgtgtggcagatgggaaattgaaagtacctctgattggttgcaaaaagcaaaattacgctaagaagtaagttatcccttaaaaaaaattattctttctgcaaccaatcagatcttcccataggagtgtaactatgtaacttcaccatctgattgcacgccacgtcttcgtttgcatataagggcaactttgtaacttcactttagcctttcattggttgcttttcacagccaattgtgggtcaccacttcatttacatgagatgagtaccaagtggccaataggagacttcaatggggtattagggcccctgagctgctgctccacaccccaaacacaggagtgtcctttcattttcagtaaatccctgcttttggcggggcatggtggctcatgcctgtaatcccagcacttcgggaggccaaggcaggtggatcacctgaggtcagcagtttgagaccagcctgaccaacatgatgaaaccctgtctctaataaaaataaagaattagccaggcttggtggcgcatgcctgtaatcatcccagctacttggaaggctgaggcatgagaatcacttgaacccaggaggcggaggttgcagtgagccgagatcgtgtcactgcactcccgcatgggcaacagagcaagactccatctcaaaacaacaacaacaacaaacaccttcaaggtctggcgtggcggctcacaccagtaatcccagcactttgggaggcggaggcaggcgtttcacctgaggtcgggagttcgagagcagcctgaccaacatggagaaaccctgtctctactaaaagtacaatattagctgggcatggtggcgcatgcctgtaatcccagccactcgggaggctgagtgaggcaggagaattgtttgaaccagggaggtggaggttgcagtgagccgagatcgcgccattgcactccagcctaggcaacaagggcgaaacctcatcctaaaaaaacaaaaacaaacaaacaccttcgggctttgtgagtgctggtctcagaaaagcactcagtcttcctccaagggctaacttacttcttcaggagttgggtgcctttgagaaatttcccaaaccactacagaggaacaacttctcccttcgttcaccactctaccaagcacttggcttttgtaccttattgcaattatttatcttctaatcttctagagcctagagaattagactgtaatgtgccttaaatgcagaggtttctcttactcttctctggagcaatgcagacgtttgttggttgaaggatcaaactccaaagtccctcccagccttggaactgtctccacgagtcataaccatacttatctatgtttagatagagaacttacgcgttcgacccagcatatttaggggctccattaaagtaataatcattattactaaggtgaatttacaggcgtactagaacacaacctaacaagagataattattcaaagctcacaacggcaccaagcacggtgctttcttttccttcattagaagccacggcttctcccctacctttcccatacctttcccaaaactctctcaaaattgcgagccttggtcatggcctttatcacctcccgcagagactgagtcatgctggtcatcgtggacggttttccagcctttgggctttgcgcaagaacgaacttcggaagagctggaaagtccagaagttagtgaaagaaggaggacacaaagggcgaagagcccgcacccttctccgcccctaggagcgcaagaggccgggagtcaggcgagctggcagccccggtggtccgcgatttgctcactgactttcctcgcacccttgtgacgaagcgcgcatgcgcgcttcgcacccaccgccccggcggctcccttgcggcgcagctgcaccagttttccgagagcagcgcatttccccgccgggcggttgatgcgggagcgccatgacacaggcgcctgcgcagagccgcgcgttggcctcctgttccgcttaaaggggcggtgcagaggcggcaggaagatggagttggggagttgcctggagggcgggagggaggcggcggaggaagagggcgagcctgaggtgaaaaagcggcgacttctgtgtgtggagtttgcctcggtcgcaagctgcgatgccgcagtggctcagtgcttcctggccgagaacgactgggagatggaagtacgctttcgctgtcctcgcttccggctccattacctaggtcggtggagcgcacaaacctcatcccttgtgcctttgtttttcagagggctctgaactcctacttcgagcctccggtggaggagagcgccttggaacgccgacctgaaaccatctctgagcccaagacctagtaagtgatgaggggagcgggagccagtccgcacggaggcagtttgataccaggtagccctgcgcgtcctgggacctgccgtggagctgggcggacgatgctgaggcagatctccaagctgcgtagccagaggagcagggcttgcgttgctgctgctgcgcggagttgcgccccagcagcggatctaacactgcaccagactgtcgcttcgaacgtgatttggggtccagggaggaaaagatggaaatgtaatgtttaactcaaatgaaaggaaataagtaagcgagaggtttgaaacaaatgaacgaaggctaaaccttctatcgaaaaatggcaacttggaagtctccttgcttcctgtattgtttatttattctaggccctaggctgaccggccagaataacaggtttgttgttgttgttatttttttttaatgcacacctactcctgttatttcagtgcccctctccagttcctgcacttaaaaagtgtagctgccttacaaggccctctactatttggctccataacttagaacctgcctttccaggttccaggcctatcaaacttttacttttttccaacgggtcattttctcctgtctttgaaacttcgtaaagatctttatt

SEQ ID NO: 123 - DNA, 6000 bp, Homo sapiens
ttgtcatttacctggagaagtgtaacagtctgagttagtcctgcggcattgatttttgtccccttctcatctgctctccacactgcagtcagaatgatctttctaagagtacatatactcatgccactcctccgtatctgaggacccttaggataaaatccagagtccttcctgtggcctcccatgccctgtgtgatccaccctctgatgcacccctctgctgcctcacctttccctgtctccccctgcattctgggctctgcctatgctgaacttctttcacttcctccaccacagtgctgtgtcacagaaatagaatgcaactcacataggtaacttaaccacataggtttctaatagcaggccgggtgcagtggctcacacctgtaatcccagcactttgggaggctaggcctccctgatcacactcctggtcacttgaggtcaggagttcaagaccagcgtggccaacatggtgaaaccccatctctactaaaaatacaaacattagctgggcgtggtggtgggcacctgtaatcccagctactcaggaggctgaggcaggagaatcgcttgaacccaggaggcagaggttgcagtgagccaagatcgtgccattgcattccagcctgggggaaaaaaaaaaagagtttctaatagccacatcataaaaaaagaaacaggtgagccgggcgcagtggctcacgcctgtaatcccagcactttgggaggctgaggcaggtggatcacctgaggtcatgagttcaagaccagcctggccaacatggtgaaaccccatctctactaaaaatacaaaaaattagctgggcatggtggcgggcacctgtaatctcagctactcaggaggctgaggtaggagaattgcttgaacctgggaggtagaggttgcagtgagccaagatcacgccattacactccagcctagacaacaagagtgaaactccatctcaaaaaaaaaaaaaggtgagattaattttaataatatttcatttaactcaatatatccaaaataccatttcatgcaatcaatataaaaagttatcgagatattttgcattttgggggcatgtgtgtatgctaagtacatactacacttagagcacatttcatttcagactagtgactttttaagtgcttgatagctacaggtggctaatggttcccatattagatggcatagctctaatatatcatgctctctcccacttcaagaccttcacacctgctgttccctcttcctggaatactctttgtctttctcttgtctaactaatgtgctactcttttgtcaatcaagtctcagtttagaacccacttcctctaggaatccttctctgagccatctagataagatgtctctactctgacctcccaaagaatcctgtacttctcttatcaaaacacatgatcttactttattgtcattgctgttatatattcggtctcccttgttgcccagagctttgtgaggactgagaccctgactgccttgcttacctgtatcactagcaatatgtaataaatgcagaagtcctcagcttttgcctccctcttaggacctcttggtctgttttattcttggtccgttttatccttcagatattgtggatggaaacctgaagtctatcatgaggctggtccttgccttggcagctcatttcaaacctggctccagcaggacggtgaaccaaggacgggactccagagcccctctgcaaagtcaccgaccacactgtgccactgctgttgcccagggagcagctgctgctctggccgatgtgtgtcatgacatgtcccgatcaggacgggatgtctttcgatatagacagaggtaagggtagaaatctgggggtgggaactgatccctctctctgatacttcttctgttagatgatacagtgcagtagatagaaacgtcacccaaacagccccagattgcagaaaagaacatggagtggggaggtaggggagggcactctcaaaagagaaaagccttttcttctgagatgtttatttttattttgcatttagcaaaagtaaaggaatcttatgtgtaagtttttgctctggtgcccaaaatttaaatatacacttttggcacagtgtgttttcttcactgggaggtccgtgggagcagtgttccagttcatctagaggaagctccactctggaatgtacccaaaggtcaggttgtcttgggagtcatggcaggaaatgctttgtgggttgtgtatctgctaagagagagcaggaccctgaggtgttgcacaggttggtgaattacttgttttttgtctgccttccctgctaggtaccaagtgtctttgaggcaggggttttgtcttactcatgtgtgtatactgctcgcagagtggcagtctctctgtacttgttgagttgatctgatctgaaggactgacaccttccctttgctggggtcctttgactttaggaacagcagcatggatgaggaaattgagaatccatactggagtgtgcgggccctagtgcagcagtacgaagggcaacaaaggtccccgtctgaatccagctgctccaggtaactgtggcctctgaaacctgaattctggaggattctcggagttctcggcttcaagtaacaatacaacaagcaaaaaggcacctaagccctttttctcccctcagtttatgtttggctttaaagggataccccttagcagtgctttgtgggtttgtgctagtaggagggtaggaaggtagggtggggtgctggtttatttcccacaaatggaatctgtgcagtcccagtgccagtgcttaactgtgaccacatgggggcatggctggaacctgtcagggcccagtccagtggttctgacatttgcatatgaggtgccagtgtttatgatagccagttccattgtgctgtccttgagcctaagtgtaactcttaaggccggaaaagtctgtgtaaagctcatagaagagaagaaattgagcagagttgtcttagagcattagaatgtttccaactttcctctacaggaactgtggctgattagtatgtgtttgagcaaactaatgatgtttgcgactctagctaaaagttgtgtgtatcctttagagccaagtacagagaccaaaacaggatacagtgccctaataaaaaccttatcagtggcagaaaaaagattactttactggctcatgtaaattgtgcttctataaacactccccagatcatgtttttactaacttcattttgttgctgaatcataatttatgctctaatgaccttttctttcctatcccaaccctgtgtaatctgctctatttagggctaattgttccttgtcttgtatgtatgttatgtgtccttgttttcttcctcctatttttttctcataaaactccatcctattttaatgcacatttcctaatttattgaggtcatatggaactctttctagtattttaatatactggtaaacttgctaactttttaccttttttacatttaatagctgtgctctttcttacttataaaattcacataacataaaattaaccattaaacattataaagtgtacaattcagtggcatttagtatcttcataatgtggtgcgaccatcacctctatccactcagaagacatcttcatcaccccaaaaggaagccctgcgcccattaagcagcaggtgtgcttttaatgagaatctaaatcatttcttccttgcttgctgcttaggttatcacctggagcggaattacaggatgttttgttgtattgcttcctgcacttctgcaggcctttcactcttctgagcctgatagtgcctgctagagttggtggtaggaggaagagtggatttcttcctgagggcacctgctttctcctccaaggcaggaggactgaggggagggctgtgagactgtgaatgtgtgaatgaggggcccaccggctatcaggctgcagtgagctaatggtgacagttttctaggagaggggccagaggagaattgtttgctttaccctgtttttcactactggattttgacattttcttctaatgctgacccctcatccagctctttggcatgctgggttagtagctgccttttcctcagtgagtccctggggaaggagagggcttcttgtggctatctggaacccagcaggttcccgcacattctgagccctcgcccccagggagcccacttagtggctctgtgacccatgaagagcccaggagcccccagatgtggcttgctcaggacgggagtggctcagaaggaaggatagcccctgggtgtctcattccctgccactgctcctccggagacgccctggggaagccctgccagcctgttgctccgaaaaccgcataccagcctcacattgtagccaagcaaaatgatccttagttggttaaaaagaacacacgaaacgccagaggggaaggtgggaggggataggtgctcggcgaattttcctggggagcgtcagagtctccaccccgaggagcggccagagccccatgcgggcctgacctgtccgaccgacccctcgtccaccaagggagggctcagagtggagaaggcaaggtttttggtgcggggctccccagcactcagaccactagagccctcctcgtgattctgccgatacgcggctcttcccctgcctatcctgaggctcccaatctcctctcctcgcatcccccaacccctcgtcgacgtccccacccccacctccaccccgcccagccccgcccctggcccgcaccctcaacctccgtccagagcggtcggttggccagcggagctggcttgggtcggagcccggctgcctcgccgcgtgtgacagcccagggagggagcagagggtggggcggggagggatccggaaggtggcacggagtgggatcgccgctggggactcgaggcgcagcctgcgccgccgggagcctccctcccagtgggagatgggttgagatgcccccgccaggggggatgcccggcaccgtgcgtccgcggaggccaagatgcagcggccaggggccggcagcctgcgaggggaggcagcttccgccggggccgggctgctgcacagtctgagcggccgggactgcgcgcttcagagcctggagcatcccagtcgctggggccgagacgccgccgccgccgccgttcccgctttctcccgcgagccgggccagtagctttgctaggctggccttcccgtggaggcgttttccagccccagcgcggggagacatgcctgaatttgggagcgatgtgactctcagcctcccacttcacccggggacgcaggcttgctgaagcccgagacaggagggggaccatgggagggacgcaagtcaaatggtgagctgaagccactctggctttggaagtggggggcctgggtgggaacaggggcagggctggaggatgctgttggccggagacaggcggggtggtgggagcattatgttgggaggaccggctgctgaccaggggttatcactataaaatacggtgggcgtaggaagtggagccagcatggggggaggatgagtagcccttgcgcctgccagggtctttggtgggggagggcacttcatgaggatatagaactcttccttattgcctattacccgtttaaaaaaattaatttgagtgggatttggaagtatctttgctgcaggattgcttgtctgataaattaagatagaagagctattagacctgtgggaattaagaaatgtatcagccagacctgatcagtcattctctgacctcagagaggattatgatgctaagtaggggattgtttataaaataggacttttaagctaatcagggaggagcctgtcatatacataattaattagcattaaaatatttttttctgacctggggcagaggatataatgcatattccttgtccatgaggtacttctttagggaggcagcagggtgcctgctctga

SEQ ID NO: 124 - DNA, 6000 bp, Homo sapiens
ttatataatgtttaaagaaagcaacaaggtgggtacataaaaatcttagtgccaaaacacacacacacacacacacacacaatcactgttggccaggcacagtggctcacacctgtaatcccagcactttgggaggcctaggcaggagaatcacttcagccaggagttcaagaccagcctgaatgacaaggtgaaaccccatctctacaaaaaatacaaaaattagttggggatagtggtgcatgtgtatagtcccagctactagagaggctgaggtgggacggtcacttgagcctgggagattgaagctgcaatgagccatgaacatgccactgtactccagcttgggcaacagagcaagaccctgtctcaaaaacaacaataacaacaacaacaacaaaacccacaaacaaacaaaaaccactgtccttgctagtcctttatcctgttttatttttcttctaacacttctagcacttaacaacacctgacatagtctacgtgtatttgcttattgtatgtctcctcgactagaatgtaagtcagctccgtgttgagcaggaattttatattgtgaatctaaaacaatgcctggcatagaacatgcattcagtaagtacttgttaaatgaatggaagatgaaccagattttggactactgcttatgctggatggcatgtaaattgaagctgtgatcaaatacaggccatgcctctaaacagctgatgaccgcttagattctaggtgccatagatactgctgcctggtttgttacaatacttttttttttttttttttgcttttactctttactattattcattactggatggtgggtgaggggaaaaatacagaatacatgccctagtccagtgctgtccattagagctttctttaataatggaagtagcctgtatctgctggtcaataaggtaaccaatagttaccaggggctgttgagcacttgaaatatggatattttgactgaactgaatttttaattttacaactagctgtggttactagttactgtatttagcagccatactcaacaatcctataggtctatcttaattacttttataggaatgaagagtattataattatttctcaattatatatatttggttttaatttctacagaggaagaggacaacaaagttttgtgaactattattcatataagtttgtagttgtttaaggaaaagacttcacagagaacagggcagagagtaacacaatatctgatttccaaaaaattcaatcaaactttgatatggatttggtcaaatcattgtttaatggcctccttaacattattattaaactgatttatataatttgctttttactaatcaaatacattgttttaaatcttaattattttttattataaaagtaatacacattcagtgtaacaagttcaaataatctctcaggtggataaaatacggacatccaccacactgtacctaccaagatgcccataccccaaagatgattgctgttaaacatttagagtgcctttcctgacttttttgtctaagcacctttaaaaaccaatacttttggttttcagtgatagctctgaatcccctttaggcatagagtgtgggaaattatatttctgcagcaaactcaggctctgcaacatcaagtgtggattcactggaaattatttgaagtaacacttagagatcatagtagccaaaaaatgttgggaaattaaaaaggggtttttaaaaattaattatcgttattattatttttttcaaagagacagggtcttcactccatcacccaggatggagttcagtggcggaattacagctcactgaagcctcaaactcctgggtgcaaccaatcctcctgcctcagcctcccaagtagcttggactacaggcatgcaccaactgtgccaggctaattttttaatattttgtagggatagggtcttgctatgttgcccaggctgatctcaaactcctgacctcaagcaatccacgcacctcagcctcccatagtgctgggattacaggagtgagctcccacacccagctgaaaaaggtttttgtggagggagtatgatcaggagaaaaatcatggaatgtgctcgaaagagatctaaagggccatggaagtcaaaaggttgaactccatagaacaaaacatgaagtatggaaagattctttaaaaaacacttgactttggaacaaaatccaaattgttcccatgatttcattctttgacattatgttcattttggttatcttagtcttttctcagaattcctctttaacagagaattatctaaaagcccctggctaagttaatgcttatgactatggtcacaaatggatggcttggattttatttgttttgcagtgtttgtaaatttttttatgtatactgttgttgtcaactaacataatccgtatgtatatgggttatatatatatatatatatattccccaaatttaaaaaccagtttggagatttttcccacacacagaaaatcagaaaattggcaatactctgccccattaccacatggcaacaatgtagacaggccatgagttctccacatggccctaatccccaccactcttaaacaaatctaatcagttttatgtatattatatatgtatattgctgtgcttctccttcctgcctgaccctgcaagacccctgtctcagtctctctcaacatgtctgaaggactcgagggcaggtgtcaaaggtgaaggccctcatctggatttaatgtcctggaccttgaaacagcagctagtgttttgagctctaagctaacactttggactttcttttttttttcgagatggagtcttgctctgtcgcccaggctggagtgcagtggcaccatctcggctcactgcaagctccacctctcgggttcacgccattctcctgcctcagcctcctgagtagctgggactacaggcgccctccaccacgcctggctaattttttgtatttttagcagagatggggtttcaccgtgttagccaggatggtctcgatctcctgacctcgtgatccgtccgccttggcctcccaaagtgctgggattacaggcatgaaccaccgcgcctggccacattttggactttcagtcatgttttctttccccaatgaaatagaaaagttttatttcaaagaggaaaagggtgcaacagctgcaacatacataaaacctatttagttttacttgggagtgggaatcaggaaacctgggttctgtttttgacttagtttggataaagaagggtagttaagctgtccttatgtctcttaccaaatggagaaaatactgctgtagttcacagcaatttggggagttttagattctatggaaaatggaaatcctatttgtaacttagattttttctttggagaaggagtctcgctctgttgcccaggctggagtgcagtggcacgatctcggctcactgcaacctccaccttccaggttcaagcgattcactgactcagcctcctcagtagctgggattacaggcacgcgccaccatgcccagctaatgtttgtatttttagtagagaccaggttttgccattttggccaggctggtctcaaactcctgacctcaagtgatctgcccaccttggcctcccaaagtgctgggattacaggcgtgagctaccgctcccggtctaatttttaaatttttgttttgtagagatgagggtctccctttgttgctcaagctggtctctgtctcttgggatcaagggatcctcctgcctcagcctcccaaagtgctgggattacaggcctgggccactgcaacctggccttcatcacaaattcattgaacacactttctttattttatccttttttatttttaaaaatttttatttcagtagttttggaggaacaggttgcatggaaaagttctttagtggtcatttctgagattttggtgcacccatcacccgagcagtgtacactgtaccatgtggcacacactttcacttaaagcatttactagacctcgctagccagatttcccatccctgagacacctggaatgttcctgaggacttagtgactactgcctaaagctccacccaagtcaattttatgtttacaggcaaccggagcatccaatcacctttctctaagagagtacaaagatcagctcgcgagaaagttcagacgtctcatttcgtttctattacacggggccttcgcccaaccagacggagtcttgctctgctgcccaggctggagtgcagtagcgcgatctcggctcattgcaaccttcgctccccgggtttaagcaattctcctgcctcagccactggagtagctaggattacaggcgcacgccaccacgccaagctaattttttgtattcttaatagagacgggggtttcaccatgttggccaggctggtctcgaactcctgacctcatcatttgcccgcctcggcctcccaaagcgctgggattacaggcgtgagccaccgtgcccagcctcgccggggccttttaagtgacgttaaaaattgtacataaaatatgttttaggataatacttgtttttctttgaccaaaggcttggcttcagagaatgtttagccagaaatagaggggcgttaaatccccttttttctaatttccaatctgaggaggaaaataacgtagtaaagggacgcaagagcaaccttgcttcttccacaacaaggcccaggcgccgccttgcaacccggaaatgcagggtgcagtgcggggggtaagggaccggccaactatgttgacccgactcagagaaaccccgcccttgccgccaccgcccacccataacgtcctcctcgaccctccctcgaccatccctcgccccgcggccctcaccgaaaaggggagggcggtggaagagagaggagtcaagggagcgcacgcgaagccccgcccctgccgtgacgtctggagacgcgacgcgtcgcctcgcaatgcaaatcgggaaaagggggtgagctgggctggcttccgtcctggtagccaaggctaattctccctcgagttcttgggagatgggcatttggcgagaaggctggcgttagtgaagcgcgcccggcgtcacggtgagtgcgggtcttgggccctagcacctgttctctgggaagtcgtccgctgtgaacgatgaacgcctttccttccaccagctgctggttaccccggagacaagctctgtccgcggagaggagtgggacaactcctaaaggtagaatcagcttgtggagaggaaaggcccaaccttgagtcttttacgccatctacctaggattgccaagcgagtttcgtgtgtttttttggttttaaaaggtggctttgaccaatcttccgttctcttggacacttatacccgactttgacctctttcctcttgcttccggtttttttttttttctgcaatctgcctacaatcccaggccttactgtagctcctaaaactgtttcccagtttctcttcttccccagtcacacttgattttagtgaagtttgagtttaaagaccctataagcttgtcagagttaaaactatgacttcctcaaatagaagattttttttttttcccctaaaaagtgccttccatcctagagttgtgggacaagttaatttcaccgccactccaccttggaaattatcagaatccttactagcagtgatgtgcattataaagctgcagaccaccctcctgggtttatttcttgcctccagttcattctgtgaccttgaacaagtcacttaatcactaacaaaaaatttacctgacacggaggtgttgcagagcctaaggaatttagtatttgttaagagacctgagggtttcagatgaaagggatttatatctaaaggatgttaccttttctgaatctgcaaagcatcgttagttttgtaaatatcttgctgcagccattaaaaatgccaagtggtatttgttaaggaag

SEQ ID NO: 125 - DNA, 6000 bp, Homo sapiens
agcgagcaggagatggaggaatagaggcgtcctgtagaaatggcttttgggtttgtggggaaggagaacagagaggcacttgagtctctcccactctggagaggcgtgtggggccaagggagggaattttttttaggatgggaaagacatgcgcatgggcagatgggaatgctatagtgaagagggtgcagtggacggggaatagagagcaaagcctggaggcgccggagcaccctgagcacaggggagacagagcggaaggaggagaggtgtgtgggtttgcggatttggtagtgggagatgagggagtcctcctgtggtggcttctgttttctccgggaaacataagcagtgttcattgagaaattaactcctgtatcatttctccctgcccatagtgactcagccggaagaaatgaaaggcattagccagggccaggcactgcagctcatggctgctgtaatcccagcgctttgggaggctgaggctggaggatctcctgagcccaggagttcgagatcagcctgggcaacatgatgagattttgtccctacaaaaaaaattttttttttttaattaaaaaagcattagtcaagcttttgtgttctaagtcctgggccttttttctcccacctcatacctgagaaagtaaataggccgttttgtagttcttgtgtctgagctaagagggagaataccactgtgtcttggggaattgatgctttggcatggaagagaggggcaggggaacaggcattctccatcccaccctgacctgcccccagaagaaagtggctgcatgcgattcgaaagccaaggactaagggctgcaactgcgggggcctgtgggagaggtcctcttgaaagagctgggatggagggagtagagggttatcttcccaaggaccaggttggacaagtgaggccctgcagatgggcaaaaaatagtggaagccctgtgactgtgaccactgatgtctgcaacagcagcagcagcagcctgaaaaatccttccacctttctctgcaaggctgtggagcacggactgaccatctctgggattgtgcaaacccctggagttcatggatgatcggagggagctgaagggcagccatgagtgatagggaaatcttgctgatctgatgggtagagactcaagctgaatttaatttggtttagaccaactaagggatgaccaaaaggtgtatttacgtcatgagttgcagagagtgtccagttggcccaggacctggacaaagggtgagcagtgagtgggagctgacatctggctctctcctcaccctgcaccctggggctggaacacagcagacacacaatgaccacatggtgccactcggccttcacagatgagcacaaggacatccctccccgccaggcccaggagcagggcagcagggcagccccacgtggaccccgtgctcacagtttggcaaactggacagagccttggctcttctccttcagcagctatcacgctctcccaggcccggccacctgagcttctcatccatgtggctttggcacctaggcctctagtttcattaccttgggtttgtatctagttccagatggcgtacatgcagagatctgggcaggctgcttacaggcattctcttgccctgcctcgacaaacactttgccacatgtgggtgaatgagagggcagacgccaatgggttaggattctgagacccctgtgtccctgtggggtttggagcaagagactggttggcacagcagtgagcacatctgctaacttcaaccacaggaagccaggggtcccagctcacctaccttccagtactgtgctcagtagccttgacaatgcggggcagagggaacagggctgccagagcttcaggactaccaaggcccaggctagcaggcacacaggctagcgaacaccacgagcccctcttctagtgcatgccagggctacagaagactggggctggatgagctctaagacttggtcagggagctgttccctcacttagtcatttatgtctgatggttccttgagcacagataggaaagtcaatcttcattctttaacaaatatgtatcaagtatctattgtgtgtgaggaccctgtgctggccactgggatatgacagggaacaaggtggactcatttctcctgcctgcaaggaactgctgtccacaggtcagggagataggcacagatacaaacagtggtgacagccaggatggcttcctggaggaaacaatggttccaaacaggtacagttggctctgaggtgccaaaacacactaaaggtagagcaagtcttttattttattttattttttaaaacagagtcttgctctgtggcccaggctggagtgcagtggagcaatctccactgcaacctctgccttccaggttcaagcaattctcctgccccagcctcccaagtagctggaattacaggtgcacacctggctaatttttgtattttttttttcttttagtagagatggggtttcaccatgttggccaggctggtctcgaactcctgacctcgggtgatctgcccgcctcagccccccaaagtgctgggattgtaggcgtaagccaccatgcctggccagtagagcaagtcttaaggggcattatattataactgcatgcaagagaagttaggaccagtttggctttgtgcgtgtgtggactgaaacccaaaagccagaaactctctgcatgtgtccctcatggagccatatggtctctagtctctgtttttcaaaatttgcaggactgatgactgattggacagtggtgcaggagggaaggtctctgcatgtcagtgattaaattgctgaagatgccactgcctgagacgggcagtattgaaggtaagcagatctggggtgggcgggacagaggaggctcttagttatatggatctggagctcacaggagcggcccagactggagatagagacttggaagtcatcagcatatggttggtagtggtcaagatgatccagagaaaaggggcagagcaggagaaaagaggaggcctaggacagagtcccggaagagcagaagacgaggtggtaaaggaatcagagacagtagccagtgaggagagggtgggccaatgaagccaaggaaaagaactgttttaataactcagcaatgggcaggaataattggctgaaaagtatacttttaaaatttgggggccgagagggaatctctaaatcctcaaagttctggaaaaaaaggcaaaaatgcttaaagatgcataaaatttgcaatacctcccccgtggtgcaccaaaattaccaatggtgaaaaaccactcactggaaatattcatttttgatccgtttgtcatccaaaccaaattgtccagaatcactggagccagtcccatcccctcctcatacgccagggggcgcacacgcactgtttgtgaattcaagttcaggacaaaaacaggcagtgaatcaggtggttaccagaacctgattcctcagcccagatccctgaacaccacagcaaccatgccctgcacattaccacgtgatccctgaatccaggcacctcaacgatctccaaattttatttctcacctgactccaaacttacagggttatcagaaagaccccacagaagaaaccccacagaggagaaacctcatctctttttctgctcagttacctgacccagggcagtgggggtaggtcccccatccttcatggtgaagcctagcaagcggcggggggaggaggggtggggtagataggaaagagctggtgtggctttggctgactcttaagtggttttaacacggattgcgtgggggcggggtctggaggcaggggcgcttggattgaagctcatcaaatccctctgatcagtaggtcttggaataaatcttcaggtaggttattggtttcacccagaaatttctagggtcattatttgagtttggtatgagaagtcagaaactcagtactgacatttaaattacatttagagggcattatcatgtctttaattccgaggccaatgtaaggttcacagctggaattggtataatattggggtattagtcagtctctgcttggggttgacactaggtcagagaagtggagggtgaacatgaggatgaaggggctttgtgtggagtttctgcaaagccagtcttatcttgggttccaagattattattaaagctgggttggtttagggtcctaaatggtctcaagtttgggtggggtttcaggtcagtatctgtgtttgggggtccttttatggtgacccaatcccaactctggaattgagaatcgaattcagagtgcattggtgttgatctgggaatgggagagcagtactggagttttatgtaaggcttggggttcagaagagagataactggggtccatagcaaggtagcttttggactttagggttcatttagggactgggggctgagcattagtacagggttccatttaaggtccagcgttggtgctagcgtcactatcaaggttagggcaagtagaagtaataaagagatttagagtcagaattggtatttgggatcagtatagaggttcacaacaaaattactacttgtgctaatttgggggcagattaagggctttggactcaatattgggtttagggcaaggtgtgggctcagtatcaggttcagatctgtatggggaggaaatggggtcctagagtggtattaggttcatgctagggctgggagccactagaaggatctggatgtagtatcagagtttggtctgtctatgttcattattggggttcgggttcaatattgaggttccggtcggtttcgacttggcgttgggttgtggcctgtctgggcctcagcggctccgcggctctacgagcgagagtgcacgaggggaggggcgccgccgggggcgcgcacggcaggggcaggggcgcgggcgcgagcgcgaggggagcgcgcggctggagctggcgcgggagcggcgggagcggtggcggcggcagaggcggcggctccagcttcggctccggctcgggctcgggctccggctccggctccggctccggctccagctcgggtggcggtggcgggagcgggaccaggtggaggcggcggcggcagaggagtgggagcagcggccctagcggcttgcggggggacatgcggaccgacggcccctggataggcggtgagtgaccccccggccccccaccagccccctccgctcccgtcccttccccgctctccttgccctccccgctagtccacccggcggagctgggggcggtcccgggggggacgagggcgccgctgaggccgggccgcgcccccacctgccgcgcccgcagcctcggcgaagccccccctccacgccccagcctggcggctcctccccgctcaccccgcggcagacgcgcccccagcgctgctggctggctcgctccccgccgcccctcgccgcctccctccctctccaccgcaccttagccgcagcccgccccccccacccagcgcaaagtttcccgtttgcgttcttgctccccctcatcggtcccgcctcgtccccccttctagcgcggacgcgctccgggggcggccctcagaccccccagccccgggctccgggcgggtccaggccgcgcccccgcccccgccgcacaggcgccccctcccagccggcgggggatccgcagccggcgcgcccgggtctcgctcgcggccccggcgcacgtgcggtcccgggctgcgccgggcgcgagtttgaagcccccccacccccttcgttcgcgagcacgggatggggaggggccgaacgggctgtacccgcccccaaccgggtgcaacgccctggaggccctggagcgacctgtcccgtgaggacgtggccactcggaccctctccgaaagttcactcagtggccgccccgcgtcccgtcccgtcccgtcccggctccccatcgccgtgccggcgtct

SEQ ID NO: 126 - DNA, 6000 bp, Homo sapiens
aataaaggaaggacttaattaaatatacacttaacaggaggtattttaactttaatcagctactgaaagctctttaattttcttatgacctcacagtgaggcttttgaagcacactatttctatacacaaaatatgtgtaggcctgggacaagaggtccctgattgagcaagattgttttctttggatgttcagttttcaccctggctaagcaaagggagactcaaagatggtaaatgttttagggtccaatacataaaaacattctcattgtctcctgagttttgaaccaattgagaagatcatgcaagatacaggcagatgaggatcagctttaatattaatgaaattaactgcagaatgttgttttacatctatggacaaggggatatataggctaatacttcatccctgactcagatacactttctaggcactggcttgggccaagggacaggaattcccatgcctggtcaagagtggctcagaacatctgcagcaaataaaaatacaggacacagctgggcacggtggctcacgtctgtaatcccaacactttaggaggctgaggcgggtggatcacctgaggtcaggagttcaagaccagcctggccaacatggtgaaaccctgtctctactaaaaatacaaaaaattagctgagtgtggtggtgggcacctgtaatacgagctactcaggaggctgaggcatgagaatcacttgaacccaaaaggcagaggttacagtgagccaagatcacgtcattgcaatctggcctgggcagtaagagcgaaactccatctcaaaaaaataaaataaaataaaaaatacaggacacacagttatatgtgaatttcaagtaaataaagctttttaagtattgcatgggatttgcttatgctaaatgtatgtggctgcttatctgaaattcacatttaactgggtattttatctggcaactctactatcactggtctcatttcaactcctcaggccccctccaatacattttccacgccacagttatgataactcttgaaattcattatctgattgtgtcatttgttagactttattaaaattcttcattgtctttaggataaggtctttcattcttgctatggcctttaagatcctgccagactctctagttccatttcattgcatctccagcccttcttgccttagattaggccttccatgtggccagccttgcctggaacatagttcccttcccaccccacatcttgagtcctccagctcaatctttagtatcacctcctccaggaagccatccctgacctcccaggctaggttagtgcccctcacaatactaatccaatatatatatgcccctccagagtgtaaatcccacaaaagcagggaccatgtctttcttggtacccaagtattggggtacctaagtcattacgagatagactcaatgtccaataaaatgcccagcacaaagcattcattcacaaatgctgaataaacactaaccattacttaaacttttctcatagattgagctcaccactatatgccatattagcctactgactgtacttggaggtactgttgccttcactctatctctctgctcttacagatatctacatcattgatgtgaagatgattacatttttggaattcatttgacttttttaaaaaatattttctacatcatttttttctctagttacttcatgtttgggagaaaggcaggaaagggacctctttatttatttatttatctgctatagactgagaacccagatgacagtttctcggaattatatttatcagattttgagagggactgtggggttcttctaaaagcaaaactcaggggtttcactgggttcctgggaatcctttttgatcttttggcttttctggctcttttaggttgccagataaaatatttccagataaatgggatgctactgcatattttttccactgttcagatgtggagagtttaaaatcatttccaggccaggtgaggtggctcccagcatgttgggaggccaaagtgggaggattgcttgagcccagaagttcaacaccagcctgggcaacatagtgagaccctgtctctacaaaaaatttaaaaaaataatttccacaacttatgcatttacatactactaatgttcttgaagtgcatatttaatcagttaattctcctgctgaaaacctcattgctttcagaacaaggctaaatgttaattttcttaaatttttccaacactaaaaatgtcgcaggcacttgagcattttcatgtgttattttacataaccctcctaactgtataaggtagctactacaggtatatcatattgcacccacatttattttatttaagttcaaccatactgcctgaggagggggaaaagggagtgaacaagagcaagttctctagaagaaaggacttagacaatgctcctgacctcccttgaggctgtctagttggagcctaaagataaaggaaaaatttaagggtaattcatactacaacaaagcatactttttaagaaggacaggttctaggcaaggctaggactaaagtgaggacagtgaagcacttgtcttgggtggaaaatccgagggaactccaaaaaactcactaatcaagaggaataatattttaatgctatatatatatatttttttttttttttttattagatggagtttcactcttgttgcccaggctggagtgcaatggcacgatctcggctgaccgcaacctctgcctcccgggttcaagtgattctcctgcctcagcttcctgagtagctgggattacaggcatgtgccaccatgccctgctaattttgtatttttagtagagatggggtttctccatgttggtcaggctggtctcagactcctgacctcaggtgatccactcgcctcagcctcccaaagtgctgggattataggcgtgagccaccgtgcccagcctaatgcaatatttttaaaaaatcaaaattaatggttgggcgcagtggctcatgcttgtaatcctagcactttgggaggtcaaggcaggtgaatcacttgaggtcaggagttcaagaccagcctgaccaagatgctgaaaccccatctctactaaaaatgcaaaaattagccgggggtggtggcatgtgcctgtaatcccagctactcaggaggctgagtcaggagaattgcttgaagccaggaggcggatgttgcagtgagctgagatcacgccactgcaacccagcctgggcaacagagcaagactctgtctcaaaaaaaaaaaaaaaacccaaaaaacaaaaaaaacaaaaaacattactgaagaatatccatgaaaagcaaaacacccaaactttatgttttattttacgttttaaattttttttttattttaataggaacagggtctgttacccaggctggtctcaaacttctgggctcccagactcctgggctcaagctatcctcccacattgacctcccaaagtattgggattacatgcatgagccaccacacccagccccgatatcaaaactataaacaaagacagaatctcactccaaacttgcatgactcatttcacagtaccttcccctaatcttggccctgttctacagcctaagtacctggttcaaatctcaattctgtcatttactatttgtgtgatgttagatagttactttttttcatcacagtttcttgatctgtagaatggggataataatggtatctccattataagattattgtgaggattagatgagctgggcacatggcagatgctacataaatgttggccattatcctgagagtcctgttgagtggcagatgtttttatatctgttaccatgcttttttaccccttctgattaagtcctcagatctgttatcatgcttgaaaagacctcagaactatatgtgtcttgtacaactgcaataatcttttgccatgtacatatagcatatatcaatcatcttttttaaaagaaggattaaaagaagtgactgcaaagtgtaaaaaatcttgccttggattggagtgaagctaaccccttttgcaagtctgttaattccacctgaccatcaaactgagggtgcgaatttgagtatttcctgaagctggttcccaagatatttttaaaaatgctttgaatgatggcaacattagataagtgtattgtttcccagggtgactaggaaaaaaatcttattgactagggtgcattgggattaagaaaaagatctccctttcgtaaatcagaggcaccaaggaaaggatctcgtgggaaaaacctgctgtcaaagtcggattacctggccacccctgagctggttcccctccagttcatcgcatgatttctatcataacaactcttgtatttagtggtttacatgtttatctcccccactagactctctgagaacagtagccaggtctagttcatttttgaatacctgacaccaagcactatgccacctaacaggcacaaattacatatttaacgactaaatgaatgaacgaaattcggttttggcagatttaacccaaaggtttcctctttcaaacaatatagttgggggttggaggaaaggagccacatacagcatctccttttagcactctgcagagaatgctaagtgcagagaaggttttatgcacaaaaatattcatggcattatagtaccgtctatggcacagtctcgacgcagggggcagttttctcttggtcgcctgcccaaccgggtaagtggatcccagctcagctccgcccctcccagcccagccctcagggcccgctgcgcaagcgcaggtggggagggcgcgcaccttccctatgcccctccgtcctccaggtggcgctggagaccccgccgccgccgcagccgcctctcgcccggccagacccgggcggcgccggccgcctcgccggccgcaggtccgcctccgccgcgccgagggcgtgggctcccggctcccggaagcggcggccgcggcgcggagccgagcgggcgtccgtcgccggagctgcaatgagcggcgcccggaggctgtgacctgcgcgcggcggcccgaccggggcccctgaatggcggctcgctgaggcggcggcggcggcggcggcggctcaggctcctcggggcgtggcgtggcggtgaaggggtgatgctgttcaagctcctgcagagacagacctatacctgcctgtcccacaggtatgggctctacgtgtgcttcttgggcgtcgttgtcaccatcgtctccgccttccagttcggagaggtgagtagcggcgccgcagcctggaccgggcgcctcgaccctgcactgccctcgccgtgccccgcgatgccccgatacagtatgtattttttcattattagagacggggttttgccatgttgcccaggctggtctcgaactcctgagctcaggcgatcgccctgtctcggcgtccccgagtgctgggattacaggcgtgagccaccgctcccggccaaatacagtattctttatcataaacgtgtgcagagactatgagcaagtcagaactggaaaaaggcatgtatgtgattttagatattgctccctcgcccaccgttttttaaaaatagagacggaggtctccctatgttgcccaggttggtctggaagtcctgggctcaagtgatcctcccttcttggctttctaaagtgctggggttacaggcatgagctaccgcacctggcccaagaaagccacttttagcaacggggaggaaagctgtatttttaagtggtttgaaatctgttccttagttttagtttttttctttttcttttttttttttttttttggtaggaggttacaaaaggttttaaaatttaacagagtagtttttagaaatgccacagtatacatttgcttgaagtctttacccatgctggattgtaagctccgtaagagaaggtgctgtctgtaaatactgtaaccctggcccaagcac

SEQ ID NO: 127 - DNA, 6000 bp, Homo sapiens
ctatgaagcccaggatagcagctgaggtggaacatccagtgggctgcatctacctatcatcagttcatgctgtccttctgtctgtctctttgggcgagcctgaggttgttcatgtgggatgatcctccaagccccgcctcatgcagacagcagcggccagagattttcagaagcctcaactcccaccttacctccagatatggggtcatatatttcctttaagggagttgtgttttgtgagtaatttttaaaatttacaatatataggctgtactattttaaagtgaagtgtttcatctggggtagggtgaactaatcaccaaacatactggaggaaatggtgaaaaactcaaaagaaagataatttttgcattttctctcgtttgattttccattcacaaagcaaactatactccttttttttcctataaaagttcacactggctgtgtttctatgaggagtcatatcacatagctcacagtaagatgacacttcgttcaatctattcttaggaacaatgtaaaaatacgtatgtggtgagattaacaattttcttatttgaactctgaacaccaaagctgacagtctcctccctcttcagatgtttgaaatcctttatgtaaaagcctaatttaaactttatagtaatagataatatttttaaatgtaatgagatttaaatatatcagtcccaaaatgtttattaaaagcaaatgtttttcttcatgtttgaaaagtaaaaaatattaatacaaagttggttcttataccttaagtcttctattaacttatctccatgtttctcctttacttaatttcccaatttttgcatgagctggtacaaaaaacattacccacttcccacaaatgatggtaccattaaatcgtattctgacttatggtgtcagtggaattctattttgatagcctgcttcttataagattagaaggggataattatattacctgtcattcaagttaaggcatcacacagttatcagtttgcatttattttctttgaattaatacaattaaaatatatgtaattcttatttcagtttgactacacctatcatgacacctaatccaaagacaaaaattaaatagtttgttagtatacatgaggataaaaccatggcaatatgacagggtgtggttctaacaagtacttcctgtacataaaataaagaccagttctatatctggtctttaatccaagtcaaacttttccttagtttatttttgtagtcttttaactgttaagtggtatgaattcttttggcttatgcattacataagcgccatccataaaacttgttctggtatgtatcaaggaccgtacaaataatcattgttggatctagaaatttcacccctaaaaatatatcctaaggaaataattccaaatgtagggaaagctatattcaaaaatcttttcattgtattacttaaaatagtaaaaactcgaaacaagctaaatagtaagatgagagtgattgagtaaattatagtaaactagctgatagaacttttttatagcaattgaaaatgaaagattgtatataaaaagcaaggaagatgattgtcatgatttttatttaaataatttttactataaaaagtttatattccatttaagaaaacaggaaaataaagagaatagaaaaaagaaaaataattataatattcgggaagaaaagcagactactcagttgtatctgtaatacgattataatttttgttaaataatagagcaagaatacttgaaagttgttttacagagttttattcttttcttatcagatatatgtagcataatttgtaatatagtcttatttatattattatttataatatacaaataatatagcataatttcttatacgtttatatttaaaactcagaaaccctcatttggagcattctcccattcttgctgcccaaatgaacaggtaaagagtgcaaattaaaagattgttccagctgggcattgtggctcatgcctgtaatcccagcactttgggaggctgaggcaagtggatcacgaggtcaagagttcaataccagcctagccaacatggtaaaaccccgtctctactaaaaatacaaaaattagctgggcgtggtggtgcatgcctgtaatcccagctactcggcaggctgaggcaggagaatcgcttgaacccggtaggtggaggttgcagtgagcagagatcacgccactgcactccaacctgagcaaaagagcaatacttcatctcaaaaaaaaaaaaaaaaaaaaggttgctccacagtcttgcgtggtaggtaccagtattccgactttacaggtgagaaacaggctgagagttgagctaacttatccaaggtctcaaagctggtactagcagaacagagattgacaatcacatcttactagcttttgaatgcctgaactcttttttcccttcctggtatcatcatggtgagaatcaaatgaggcaaacatagaaatgtattctggaaatgggggtattgcccctccctggggtttcaggatcacccacttttcccatgccgtcccacaaaggacagagatcataattgtaaagctttgtgaaaaaataaacaagatactggtaatatcctgttacaattttctttttgaaaatgtctcagccaggcacagtggttcacgcctgtaatcccagcattttgggaggctgaggcaggaggatcatttgaggccaggagtttgagaccagcctaggcaacataacgagactccatctccacttttttttttttaatgtctcaaatcttctgttgtagggaaattctgatctatgagaggctgcttgaaataaatgggctactggccaaggcttggaaatgtttgtggtatgagaaggtcagttgttatttggcatcgacagatacattattattgctatttagaaacaattagtttctaaatatttgaaacaattagtttcaaattattgaaaaggcagtaaatgtaaaattattcctttggaaagaccctatttatagaaaattgtgcctcaggtatacattttgcttaccattagatctatttcaattccaaaggaatatatggagggagagggagtatttgtagcttctaaaaatgttcatggaggggtggcttattctctttgcccttagtttaatagaagcaagaggtagtttggagtagcaggaagtcagagatgggttcattgtatcgttatttctagtcctagctcttcactgtccttggcaaggttcttaacctctctgggttcccctcttcttacctttctcctattcttccccaagtgtgggagtcacacttcaacactatacacccgggagtgttgtgttgttaaaaagtattgttaaatactttttaaacgtgttgaatacttgttaaatactttttaaatgtgtatttatttatttgagttagtactacatacacatggttcaacatgtaaaagacataaagggaaattcagtgccatctccctcccacctgctcctttctgcgtgtccctgttccagttctcagttttctttttcaaactcagaaatcccaagagtctgtgaagggcaaatgaaaagcaaaatgactagactaaatctgaatgaaagggatttattctaaggtgatactgctcactgctcaaggtgcttatctgcccccttcatgggctccctcaagttttctgagacttcaaacagcaacactcaactaaactataaaatagtcacagcaccttttcgagaaattttgactttgaacttgctaatatgcaaaggaaatagtccaaccatttctctagaacttggttgataagaaattttattttgtcccatttataattttattctaaaaatttgtttttttctgctatcgagtaggagagaagggaataagggaaagatttgtttttgcactactgtgagatttttataccttaggccaggacaaagcacacaagaaataaaatattaacaaaatgtccttaattttcctttctgaccaaaattgcttgcctctgcatttatatataaagaagggatgtgttgagcaaatgaaggaggacagctaggcagacaagatttgcccagcgcctggcatacaataggggcacaggtcattgcttaacaaaacgtataatttattaatacatgctcgaagcactgctatactaaccaaatattccctgcaaaattttaaatttacagtgcaaaataagaataatttaaaaactgtttctagaaaaagagctttaagggcttccccccccataacaatttaagattaacctagaacatggtagttattttgcaagaactggggagcaccactctcttctccttgtgcatgtctgacattggaggcctattgtgcacgaagttgtgatcaaaatccaagtcaattcattttgaaaagtaacatgactacaacatccatccactccaatgagcaaagggtgtaggctttgagtatacacagcaggccacacactatgggtcatggcatacagtctagcgttggaggttgctgcatttgttcatgtatctatgagttaggttttaagttttttccccctgttctattaatataattaattagttaattaaccccactcattcatttactcagtccacagccttttgttaagagcccgcctaggacataaagatgaagatccagtgcctaccctcatgaaacatagaatccgagcgaagaaggcttactttgcaatagtcatccaagtggtgcttttatggcgctttactgctcccgccaacacccagtgcctgggtatgacctcaggcggtggcagagcccgcgtgcgaggtcccgctctccctggcttgccccggcagggcggagtcagcctagcagccgccggcgctgcccccgcgcggcctttaattttgcagctccgaccaccggaaattagtcgaaggctgagcggacccggtcgagagccggcgagctccgcgcagggagggtgcgcccaccggtcccgccgggcgcccgcgggacgcgccgccagggccctctccgccgggggctcggcgctcgcccacctcttccaaatttaaccattacctaaatccgaagggaaatgagcaaacctctcggattgggtgtcaaggtattttcagcctcgttgggcgtatttatccccaagtgtttccacaacaagctatttcggggcctgcggggcaggtttcgctctgcggacgccgtggccactcgccgggctccaggccggcggcaccgcgggccggtgattcacggtcccgacccgggggtggtgcagccctaggaggcggcggggtcgggggtggggggggcgggtgaccgaggcctgaggggcggggagggtcctcggagcggggcgccccccacccctctctcgccagtcaatctgtgtcctcaatctgtggcttctctcgctgcggaagtctccctggagccaagaatagttcattttctttcaagtcatttctagtgcctaagtgtccggacctccaatttcccccatcccctgccgacccacagggagagaactgggaggactactaaggggcgcgcgggacgggctggaaaggccaggccccccaccgcctggccacttgcgcaaaggagcgcgcccggccgcccgacgggggttgggagcaggtctgggagggctatgcgagcgactcagtaacgctcaggaagtgaagcttgtggttttgggggctgagctcggaaggagaattttttttttttttaagtcagagagatagagcggtctctcccgaaagcaagattccgtttgaaaactctcctagcgcggtgcccgcgccgtgactccgcaggtaggtccgccgagcctgttctgcgcctcctgccctggtgggggcggccgcggggactcgcagagcactggcactgcgggggcgatcagagggcgcgggcggtttcccacctgctgcggaccgccgtgcgg

SEQ ID NO: 128 - DNA, 6000 bp, Homo sapiens
atgcttggtaaaagtcatcgccattctccagtctcgagtacccagggacacaatgcactgcggaaggccacatggacctctgcccaagaaagcctgggtattgtccaaggattccccccactgagacagcctgagataatggcctcatgagaagagaaagatctgaccgtcccccagcccgacacccaaaaagggtctgtgttgaggaggattagtgaaagaaggcctctttgcagttgagaaaagaggaaggcatctgtctcctgctcgtccctgggaatggaatgtctcggtataaaacccgatcgtacattctatttacttggatgggagaaaaccgccttatagctggaggtgagacatgctggcggcaatactactctttattgcactgagatgtttgtgtaaagtcaaacataaacctggcctacgtgcatatccagacatagcacctttccttaaacttatttatgacacagagtcctttgctcacgttttcctgctgactccaccattaccctctagtcctgtcgcatccccctcaccgagatggggatagtgatcaataaatactgagggaactcagagaccagtgcccatgcagatcctccgtatgctaagcgccggtcccctgggcccacttttcttcctctatactttgtctctccgtcttatttattttctcagtctctcgtcccacctgaagagaaatacccacaggtgtggaggggctggcccccttcatcttaccaccagagagaaaaagccaagtgattccatgcctgatcaaagatgttatttcctttttatgaaaagcattaaaaccagaaaggagaaattattagctctttatttctgtcaaatcttctgtttcatagctgaatttaaaaatatatatactatcatagacaaaggtgtttgctcatcacatcaggccccttacctatccggcacacacacctttttttccaagtttaaagatatccaactataactcaatctacctcataaaactgtaaacacaacccctactttcctcaacaggtggactgtcatgggtgatgtatggggagagcatgatggtgtcattaatcatagcttatacttactgagctctatatgccaggcacaattccaagtgttttacatctattagctcacttaatccttacaacaaccccatgaggaaggggttgcacagataaagaaactgaggcagagagaggttacacagttactaaatagcacaggtagactcagaaccatattactatccccactgcacaaagaaattgaggcagagagaagttacacagttactaaatagcacaggtggacttataacctttgcattttggctccagagtccatgctcttattcactatgccatcctttcctcctctgtttcattgtaatccaattccatattgatatagtttggatgtttgtcccctccaaatctcatgttgagatataatccgtaatgttggtagtggggtccagtgggaggtgtttgggtcatggaggcagatccctcattaatgtcttggtgctatcttcacgatactgagttcttcttgcaagatctggttgtttaaaagtatgtggcaccaccccacccccttgctcctgcgctctccatgtgatacctgggctcccctttcccttctgccatgattgaaatcttcctgaggcccagcagaggctggggccatgcttccagtagagcctgcagaactgttagccaattaaatctcttttctttataaattacccagtctcaggtatttatagcaacacaagaacctaatacaaatatctctgcaatttatgcaacacccacaatatttaatatttaatgcagcaagaaaaaccaggcaactgtattaaaaatttccttttggaaaaatgaaaagggaaataaactctaaaacgttgctgtacagaaatactaagggaacagaaagggactggcaaactttaggggcatgatttgttgacttcattcctaagcagaggaggaagtgcttttgtcagtatatctggtgtcttaggttttatgtgttaggccagtgctcctcaattttaaatcacctggagatcttgtcaaaatacagattctgattcagtaggtctgggtgagacctaagattctgcatgtctaacaaattcccgagtagcagtggcacgctgctggtccagagtccacactctaaataacaaggctctgggacacgggctttcaatgctggctctgcattagaattacctgcacagctaataaaaaaaaaaaaaaaagccaataaggaataatgggccccactcaagactaatgaaattagaatctctggttttttttttaaattccccagataattccaatatgcagctaagattcagcatagctgttttaagaggatttcccttgtctctcatcagagacactgaagatagattctaatgtaggggactaaatcactttagtgttcaatttcaatttttgttgatatcccaggaattcactccagaattgagattcctgcgccattcatttaagacagccaatgcccttgctcagcagggttgagtttttctggtcataaaatcttccaatcaatttttttttccctttcatttttgctaaagccaacatcaaaaatctaatcaggtcacaggccttagaaacacgctgaagtttgccccttccccatttttctctcttgagcaaactaaactttaaaacctcactctcattcatacttgacctgagttctgagagacaagagaccacagcctaatcaacacctttgcttgtttttgccaatttaccattccggggtaagagaatcctaatagccatgacaccattgatcagcttgatccgcatcttttctgagggcctattacaggaaatccacttattttgttactatttattggttacaatatagtctgttgcaaccaacagacattaactcaggttggtttgaccaaaacaggagaatttataaggaaacaaacatgtcacagagcctggtacagaaatacagccatgtttaaggaagggcagttaagggctttctctcaatcctacacttcaacttccctctgcttcattgtctctctgcagacctctgttctcagcttctctgtacacaaaaaaagatatgtatgaatcctcacaggtgctaagttaacatgttacagttccagctccataggaagactcagacttgactctcttggtcctaattctgaaaccaaggagaggatctgactggccagtttgagctaggcaaacacctcctagtccaacttgctctggttagtaaaacgggagccagagacaaatcactgtgggtgagtaaacaattccccaacaagaggcaagacagagaaaggaacctaaagaaaatatcttatcacatctgtaagccagtgtagctgaaaagaccaaagggaaaataaagtctccactatgaacagtcaattttacaggttgtacatatagctgggagaattttatacattcagtaaatatttattgggagcttattatgtgtcaaatgttgtgtcagactttgggaaattaacaatgtacaaaacagatactccttactagatgtgcagtctagtaggagacataaaataatgaacagcaattataatacggactaaggtattgtaacaggggtcatgcaggatgctataagagtacctaaaaggggactcttacccagacttaggacatcaggaaaagcttcctagagataaatcatgtctcagcttggggctttaagacaaatattagcaaggaagggaaaagaaaaaaattccaggcacaggtaataaagatctttacgaagtttcaaagacaggagaaaatgacccgttggaaaaaagtaaaagtttgataggcctggaacctggaaaggcaggttctaagttatggagccaaatagtagagggccttgtaaggcagctacactttttaagtgcaggaactggagaggggcactgaaataacaggagtaggtgtgcattaaaaaaaaataacaacaacaacaaacctgttattctggccggtcagcctagggcctagaataaataaacaatacaggaagcaaggagacttccaagttgccatttttcgatagaaggtttagccttcgttcatttgtttcaaacctctcgcttacttatttcctttcatttgagttaaacattacatttccatcttttcctccctggaccccaaatcacgttcgaagcgacagtctggtgcagtgttagatccgctgctggggcgcaactccgcgcagcagcagcaacgcaagccctgctcctctggctacgcagcttggagatctgcctcagcatcgtccgcccagctccacggcaggtcccaggacgcgcagggctacctggtatcaaactgcctccgtgcggactggctcccgctcccctcatcacttactaggtcttgggctcagagatggtttcaggtcggcgttccaaggcgctctcctccaccggaggctcgaagtaggagttcagagccctctgaaaaacaaaggcacaagggatgaggtttgtgcgctccaccgacctaggtaatggagccggaagcgaggacagcgaaagcgtacttccatctcccagtcgttctcggccaggaagcactgagccactgcggcatcgcagcttgcgaccgaggcaaactccacacacagaagtcgccgctttttcacctcaggctcgccctcttcctccgccgcctccctcccgccctccaggcaactccccaactccatcttcctgccgcctctgcaccgcccctttaagcggaacaggaggccaacgcgcggctctgcgcaggcgcctgtgtcatggcgctcccgcatcaaccgcccggcggggaaatgcgctgctctcggaaaactggtgcagctgcgccgcaagggagccgccggggcggtgggtgcgaagcgcgcatgcgcgcttcgtcacaagggtgcgaggaaagtcagtgagcaaatcgcggaccaccggggctgccagctcgcctgactcccggcctcttgcgctcctaggggcggagaagggtgcgggctcttcgccctttgtgtcctccttctttcactaacttctggactttccagctcttccgaagttcgttcttgcgcaaagcccaaaggctggaaaaccgtccacgatgaccagcatgactcagtctctgcgggaggtgataaaggccatgaccaaggctcgcaattttgagagagttttgggaaaggtatgggaaaggtaggggagaagccgtggcttctaatgaaggaaaagaaagcaccgtgcttggtgccgttgtgagctttgaataattatctcttgttaggttgtgttctagtacgcctgtaaattcaccttagtaataatgattattactttaatggagcccctaaatatgctgggtcgaacgcgtaagttctctatctaaacatagataagtatggttatgactcgtggagacagttccaaggctgggagggactttggagtttgatccttcaaccaacaaacgtctgcattgctccagagaagagtaagagaaacctctgcatttaaggcacattacagtctaattctctaggctctagaagattagaagataaataattgcaataaggtacaaaagccaagtgcttggtagagtggtgaacgaagggagaagttgttcctctgtagtggtttgggaaatttctcaaaggcacccaactcctgaagaagtaagttagcccttggaggaagactgagtgcttttctgagaccagcactcacaaagcccgaaggtgtttgtttgtttttgtttttttaggatgaggtttcgcccttgttgcctaggctggagtgcaatggcgcgatctcggctcactgcaacctccacctccctggttcaaacaattctcctgcctcactcagcctcccgagtggctgggatt

SEQ ID NO: 129 - DNA, 6000 bp, Homo sapiens
caagggagaaaaaaaagtcaatgtcttggcatttagtactccatcttgctacattctaggcgagaaatttttagttatttaagccacgttcctgaaagtctactctagccttatgtggtttgaactcactgttaactctgcatagctacgagttaaactgtagcagcctactgaatttctggatcttaatctggtaggcccagctccatatgcaaagataaaacatctagtcagcttttgagtttctggctttctgaattgggtcacctgccagggctcacagatgagtccaccacctgaaaagaatgatcataatctgtatctaggatgaataaaacaaaacactgtgcccttagttgtgtgcagcctgagaaatgagtcacttcatgagactgttttcaggatatgattggctgaaagagctttgagtgtatcaagtcctactgaggcagttttgtgggaaacaatcacactaaactggaagactgtttgccatgtcaaaggtctcgaattgtaattagaagtgcaaagctatttcggataacttcttgttatttttggggaaaagacaaaagacaagaaaaggtcattttcacttctatgatgttagtggaatcaggaggaaattctagactagaaccatgctactattttcataatagaatgttttaatcccttctattctctctctttccaatgtgtctgaaacataaacaataagatcaaagttctttttcttttctttttatttttgagacagagtttcactcttgtcacttaggttggagtgcagtggcgtgctctcggctcactgcaacctccacttcccaggttcaagcgattctcctgcctcagcctcctgagtagctggaagtacaagcatgcaccaccacactgggctaatttttttttttttttttttttttttggagacagagtctcactctgtcaccaggctggagtacagtagagtgatcttggctcactgcaacctccacctcccgggttcaagcaattctcctgcctcagcctcccgagtagctgggattacaggcacgtaccaccgtgcccagctaatttttgtatttttagtagagacggggtttcgccatgttcggcaggctggtcttgaactcctgatctcaggtgatctacccatctcaggctcccaaagtgctgggattacaggcatgagccaccgctcctggcaagatcaaagttctttttctgaaacaactcataaatacatgaagtagagctatacaatcttgtttggtttttctgtgcaactttttttaagtgtattcttttaagttgttatggtaagtaatcctatttctaggtttttttatttcaagggaagttcagagtaactttactggtccagggagcaagatagaagaaactgagatatgattcccagtgctctttactttgccacttctataaaatagcatcatccaacttgccactcccagagagagaattgctgacagagggcaaggtttataccacctccactcactggtaatgtctatcatttgtttctcttgtttcaatctgccagggttccagatatactagtgaacaggctatcctacacctggttgtaattggtaaactcttacactgtgagtcaatctttttgtcctttttccctttccttgaggccccaagagttttgttggttggttggtggcagaagtgtgaagctaatttaaatattggttgagtattcgttattaacttaaactccaaccagtcctagcccaaaaatctgatttacagtggaagaaactgacccttttcacataacttattttgctgtgtctccaaatacttcctgtatactgggggccttttaaaaaatgcatactgagacttgtggttaaaagatgaatttaagcaccctatggtaggcaagataacaccccctgccccaccgccccaatccctggaaccagtgaatatatcagattacatggcaagggggacttatatatgatatgagaaacattcagccttccattgctggctttgaagatggaggaagtggacaatgagccaaggaagtcaagtgacctctagaagctgcaaaaggcatggaagtggattctcccctagagcctgtaaaagaaaacagccctgccaacaccttgattttttttttttttttttttttttgagacagagttttgctcttgttgcccaggctggagtgcaatggtgcaatcttggctcaccacaacctccacctcccgggttcaagtgattctcccgcctcagtctcccaagtggctgggattacaggcatgtgccaacaaacttggctaatcttgtatttttagtagagatggggtttctccatgttggtgaggctggtcttgaactcccaacctcaggtgatccgtccatcttggcctcccaaagtgctgggattacaggcgtgagccaccacatgtggcaccaagaggttgcccagccaacatcttgatttttaaccagtgagccctatgtcagacttttaccctacagaactctaagatcaaaaatttgtactgtttcaagccactaaatttgtgggaatttgttacaacagcacttggatactaatacaaactcttcttagggttctgggagcagttatttacggtacagagatcaggtgggctgttaaattattttcatatgggagaaaagcccacagttggatctgtaaacctccttactgggaattatctcagccctaagaagttccttcttaatcactcccactaaaataagggatgtggtaagaatgccaatcaatcagcatcctttctgtagtatttaccacgatggaatgagatcaggctgaaagtattcacattagggcacttaaaatgtaccaaagatctggctatggtgcttaccctgtgtttcctcccaccagtctgttgaacaggaagttcaacatcaccagattctctgacaaaaacaccagaggaattacagagaacgttttttcccagatgcgatctattgttttatcaccaagcaatcacataccacattgtttaaatatattgccccatatgtaacacagtgtttctgactgagcaccttggatcaactgggaagagttaaacacaggaatgcttaggtccaacattgaaacaattaagacaggatttctgggagtgggacctaagcaaggatatttttctgaagctccctagatggctctgatgcaaagtgaagattgagaactactggtgcgatgattatgtatgccagagaccatgactttaagttcttataaaggaataaggtagtacataatagggataatattacaaaaaaccaaacgtacaaatagacttgttcttgcacacttaagagagatccttggaacaatcctccattaagaaactacgacactaccatgaaataatttttcatccttatagaaagcaggtaagattgactaatagaccacaactactgtctacattctcaaaatccatgtgcctttccaaaattagctacgtaactacagtgagagagaaaaaaaaatgtgagtaaatgtcttgtgaaaaattccacttggtttggaaaaatttttgcctgcttttccacattttctaagaagaatctaaagatcttggccaacagtgtcccaggtaagagaaaatcgtgcttgggtatttccatagttctacaaactctacctggataaaagtaatgaaagaggtcctaagaagcttgaccgcactgtgatcaccaccatgggcactataccagctctgaagcccagaactgtctttgagaatattcaatgctgccctagaagaaataggagaacaaaactcacgtgttcctagcctgcaaaacagtcggtggagcacgtatatgtaaaaatagaaaaggctggcaagaccaggtcatatttaatattcatgaggcacaagatatacaacacgcacttaatattcattaatcagtatatattcataatatactaaatatacaggagatattaaacgttcacgggtcttaattctgccacccagtggagacactcaaaagtgatctcgccaaagaaatgcaaaacctgtacctgcccaccaggctattagcatgctactgctgtggccaccattctttcactgcatcgccctgccctgcatcggaatatagcaccttgaacacgggatcaggtttactgaattctgtgacccacgctgggagctcaataaatgtttgctaaacggaaatgaacccaattcagaccgtgtagaaaccccagattatatcttttctccaaacattcaatttccaagcagtatttttgaaaatgcgtgatggctaaattcgagttatcctttttgtatgtatgttaggcacacaaccggcgatgacatacaaggcgaggtgacaccactgcactcccagcccgcacgtcacctataagcacagggggcttttggtgctggtttatttttgaaggctggtacttctcttcgatctaagttttaggaacctgtgctcgtcgacggctgccaatactttttattttcaaggctgacgctcgccagagtttcacaagctgctcccggacgctgtggtctctcgctagagtggatccgaactctgcgtgacgctgggaacggccagcgtctgttgcctcacgaaaacatctcccacaaggtggccgcctcgcgcgaggtcagcagcagggcaaacagggatgcgtgagtgactgacgtgagctaatcgctaatgacaggcttcacagccccggcggccctcagagccaggcacctcgcacccctcctcctcctcgagacccagtcccggcccgcccaccgttcccacgccgcccaataggcgccgacgctactcagcgagtggccggaggaggaggtgttgggacggccggacgctgaacggccgttcacgtcaacgtagtgacgtcacgcgtcgacgctggggcgtacctttcgggctcctgactcctgccgcttctcttccccttccgtgggtcagggccggtccggtccggaacctgcagcccctttcccagtgttctagttcgcccgtgacccggaataatgagcaaggagggtgtggtgggttgaaagccatcctactttactcccgagttagagcatggattcagttttagtcttaagggggaagtgagattggagatttttatttttaattttgggcagaagcaggttgactctagggatctccagagcgagaggatttaacttcatgttgctcccgtgtttgaaggaggacaataaaagtcccaccgggcaaaattttcgtaacctctgcggtagaaaacgtcaggtatcttttaaatcgcgatagttttcgctgtgtcaggctttcttcggtggagctccgagggtagctaggttctaggtttgaaacagatgcagaatccaaaggcagcgcaaaaaacagccaccgattttgctatgtctctgagctgcgaggtgagttgcattgtatgagcgaagagttgtcagctctcctgttcacagattttgggtcaactgtgaggccacagcgctcatcttggtttctcttacaatgtacctacataatgttgaaaggtacatcgtgaattgggatgctaacccatcctgattaggtatataccctcagacattctttaaaatttcacacatctgcttcaggaaccgtcgaaggacctctgaataaaatggaagtgggttccaggagaagattaactttaaacttagaggagtgggttttactttcgctaaattttccccaatttaaaaataatattcagtttttctatctttagatatatatgtatgtaaaatattttttgtgtatatatatttgtggtttgatcttaaacttgaccagaaactgccttagaatctcagaaattgactttgcatgtggtatgctttgtttgtatggcattttaaaactgcggagcatatagaagataattacatatgcattgtg

SEQ ID NO: 130 - DNA, 6000 bp, Homo sapiens; identical to SEQ ID NO: 18

SEQ ID NO: 131 - DNA, 6000 bp, Homo sapiens
tctgcttaagattcaatgttctacaatgccatgaaatgggtctgcttaagactcaatgttctacaatgccatggaaatgtgcttttgagatagaggtgctcatgggaggttcatgatgatggtcctctcttcctggtgcttggtctgggactgtggcctcaagctccctgggacattaaaacatattttggaaaaggctgacctttgctccagacacctgtgggagcaccattgtctgtgtgggagtggggaggtgcttctttaggacttaagggcaagcaggtcctgagacattcctaagaaaatttgagagtggccaaacacacgcagggttgaaagtatgagtatcactttccaatgcacaacacagctcacatgcactctggcacttactgttgggttaggtctttaatttaaataaatttaaaagacatagaatagtgcaaagtctactgtgacaagcaccaatattcctactgtgagagtcaacaactgccaaaattggaattttattttatttccattaagccattttgttactattaataataaagaaaatattacagatacggtcaaagcctactctaatccttacacaaagtctcattcccttcacactagcaagagtttggagtacatccattggtcaattgtttatagttttatatgttgtatgtgtgagtatatacgtataagcatccataaacaatgtgtaagcacatcttaagtaaagagtattatactgcatgtattaatgcacatacttatatttttagctctagcaaaaaatagatcaaactcataactgtagcaaagtatttcatcacatgaataaactacataatatcgatccttttttttactgatggacattgtaatcatttctacttctttgctgctgaaaataatgttgcactaaacatcttttatatgtctgtcttgatgtatctttttggcacacacacgtgccagtgtttacttagaagtgaatatcggtcctcctaaaagagaaatccctagctcataagagaggagcatgttcattttcactagcagctcctttattagtcctcacgagtccagacgtctgtgcacacttcctctagagcatgagagggccattttcttatagcctcaccaatgcctgatactgtcacactatatcatttttgccaatctgatgaaaaaattataccaacttattttaattaatttgtatttcttattgttatcatctctccctaagtcaactggccatttgcatttcctcttctgtgaaccgattgcctattcaacacctttgttcatttttctgtggacatcaaccatcatcgctgtgaaaaggagctcataaagctcctgacaaaagcatcacatgctagtcagttatccctttcccttccctgaactctagcccttgtctaagttgcagcaacagaaagctaaaaacgcactctgtcaaaaatgcctttgcataactgtggtttcaccacattgctttgtattttagtaacagtccatgggggtgtacatttctgcctttggtcaaactattattgaggacatgatccacagcattattaaaatctctcctaaaacacctacataacaaactcctctcaagtctcaaagatcagactgttatatccattaaagagtgaattccttttgataagagtagttcagtaaatatcttggtaacctcagattgcttcctttagtcactccttttgtctcagaattcatgagctccaggaaacttagagcaaagttttctgcacatctctaaaagactaacttccctagcctaaggtagtatcttccagctactctgtgtgtgtgttttccttctttttagggtttgcaggttgttgttttcttttatctttgcacgtttcacacttaacactacatatgctcataggatgtagtagacagcaaagcatatgagtaaacatttggcctttggaaatagaaatcgtatgtttgccacagctctgccacttcccagctatgtggccttggataccctacatgatcttcactttcttaacttgcaaaatgggagtagtagtctctatctcatggtgctgcggtattgttaagttaaatggcccaaaacaggtaaagtgcttaggatagtggctagcaagaagtaagtgctgagtaacgattagctattgctgagtaagcaataaacataccgacgtgcttacatttgtagattcacatagcacctgcccaagctaacttagtaaatatgcatgcaattcttcatcagtgtctaagtggaaagcagatactccactctattcagggccttgtaagactggagcatgtggacacttgggcccatcccctctatagtctgtctagtggtggtgttgagttagaagctactgggctacctgctcccatatacacctattaattgtattcacctgggactttgatgaagtctggtggacaactgggtgactcagagccctctcaggaccttgtgggaagggctctgatcagtggaatctccagagctcagtcattcctccatccccttcagctccaaactgcagcctcagacagactacaaaatagatttctgtcccaggcccctggcaaacactgtgtgggcagctctcaccttccctctgttccaatcatctgctcactctgccctgtgccggcctccggtgataaaataaatgagtgttctgcttgaaggctgccctgacctcaccaatctcctacttccagtttgtcacaggcctcggggacagtttgcttctccaaatattttgtatatccagacgttcccatttcctaggagcaaaatagtgctactatagtcctgcagggggtctactccatccccactttccaccatctgggctaggttattttgatggctacataatattccactaagtggatgttctataactttggttaatatactggtaaataggttacttccagttgcaagattaattttatgcatctttgtgcaggaagagtcactggatcaaagaacaagtagagtaaaattttaatatatgttgttattctgttcccaggaggttgcatacatttgtactctcatccgctgtgtaacaactatttctccataccctcaccaacacagggtataaacaaacttcatgtttgtccatcaataggttttaagaaaagcctctccttgctttaatttttaattccctaacaatgagtgaggttctgcatctttttatagctttgttagccatgtcaattaatttttccacaaagtatctttccatgtctaatgcattctttttgtttatggggttgtctgaaaattgcttaatgatttgtatgagcccttggttcgataagaaaacttatgtgttaaagtgtgtcccgatttttttctcatattatctaactttttatgaaattttgatgtgcttaattttttaatgggattaatttactagtcttttcttttatgggtcctaagagtatttacatgcgttacttccctctctcttcacaagggcatagggaacatttatttgtttgtttgtttatttttattactttttgagacaggatcttgctctgcagcccaggctggagtgcagtggcgcgatcacggttcactgctgcctctgcctcccgggttgaagcgatcctcccacctcagcccccccaagtagctgggattacagccccgcgccaccatgcccggctaatttttgaatttttagtagagacggagtctcgccatgctgctcaggctggtctcgaactcctaggttcaagtgatctcctgcctcagcctcccaaagtgctgggattacaggcgtgagccaccggaccccgccaggaacatttatgatgtatcccatttcaccttggagtaaactgaagctcaaagaataatgagtgaaactgggtttagatcttgagctccctaattccccatccaggtcttcttcacagcctggctgcccttcacatcttccaaaaaggtctttcaagttgtcaatttgtttacactactcttccaaacatttatatcgaaagtttaaaggaaacaataagtacataaaaaagaaagataagaaatagacctcagtattaaccttttcaaatatttagttggtgatagcgcagaagaggggaaaccgaggctgtccttgccattcacgctgtgaagatgcgaccctggctcactccccgcagctccagggcagctggaagcagagaactcccatatctctaataaagccgggcctctcgcagatgtcagcgcattgcattgactcctggacacctgcactaaaggcccttcaggcacctccaactaaatatgcccagaactgaactcaccctatctcttctccatctcaggtaagctgccaggtggccaaggctgggagtcatgatgctttctccttctgaacatccacaatcgggggcagagaccttcaccttccatctcctaaacactctacgatgggtcctcttctcttcacccccactccccgcacccctgccacacacctctcccaccattgcacgcgcccagtctccacgcgcatttcctctcccaccctgcagcagccgccctagcatattacctctaatgcaaatcgcaccactgtcccgcaggctgaaagcctcggtgcactcaggacaagagtccacgcttcttaaacaaacggtcgacgttgtccgcgacctggcccggcccaacgggtcagaccgtcattggccatctcacagtcccggcgctccagagcccctcccacagcgggacatgaaggaggcggatacggctggaccttacccggcccgcccaaggcgtccgggacccgcccaggcgctgacgctaactggagagcctggccccgcggtctccttgtcctgccaatctccgggaggcgggatccgtctgagggcctggaccaattcgggagcgggggcgcggaaagaggcggggctacgagctcctcccagagctccagcctccaggcacccgggatccagcgccgccgctcataacacccgcgaccccgcagctaagcgcagctcccgacgcaatggacccggcgctggcagcccagatgagcgaggctgtggccgagaagatgctccagtaccggcgggacacagcaggctggaagatttgccgggaaggcgtgagtgaggagctgggcgggaaggggtcgcggagacggcttcgtggagcccgggtccccagaagcccccaagcgcctcctctccccgttgttttctgctccccaatcccctggacccgattgagagggattccaatggggattgttttcttctttaaaaaaaagattgggcctgttatgctcacaatgacttcaggtggtaagtatctgttcctttcactcagtgacttgcccaaggtcacctggctgttgaatgctgtttaggactggatgtttctgtgacagtggtaaaagtaaataaattgcatttaaggggtaagcaggtgtttaaaaacaaaacaaaatgaaagaatgtggtcgcagctaaggaggtttttacatgttgtttaaatccagtaaagtctgatccagcatctgatgcatactaaggttttcttctgtgttcattacagcatgaacccctctctttgtcgttgccagagggtagcatgggagtagttttgcttgacccttctgacttttcattacagcatgaacccctctctttgtcgttgccagagggtaacatgggagtagttttgcttgacccttctgacttttcattacagcatgaacccctctctttgtcgttgccagagggtagcatgggagtagttttgcttgacccttctgacttttcattacagcatgaacccctctctttgtcgttgccagagggtagcatgggagtagttttgcttgacccttctgacttttcattaagtagccctgggttgctcaaggaaacagaatgcctggtggcttttaagataatttt

SEQ ID NO: 132 - DNA, 6000 bp, Homo sapiens; identical to SEQ ID NO: 27

SEQ ID NO: 133 - DNA, 6000 bp, Homo sapiens
ggacatgaaacctgggggccactgcctttatttagttaggcaagaataaatttgcacgtgcctgtgcataaaaaataatcgcctaatgtaatcgaatgttggtttttgctatgcccttttcccaatgaggcagcatctagaaagatcaaaagatgatttattccagtacagtgtgtgcaaaggggattgagtgtgtgccatgttgcattttcattataaatttcgtcctgagacccaattaacaggcctgttttctctttcattaaaatcacttttagaaaaaaaatgaaggtaggagggtttttatgatatcacagagcaagcagcaaaattagttatgccccatgaatttccttcttttgcatatgggttcatttccaattgaagtcagggtctgaggcttgtgatactactctaggggctgctgggtctgaggggatgagaggccttggatacagattattatggccctgctgccaaccatgttactactacagtaaactgttttcattcacgttgatttttgttagctgtttaagagcattagactggtgggtacacttttgttcttactagtatttactagcaaaaaaaaaaaaaaaccctgtttttaagcatttcattttaagtaaatatctgttttgttgttgcagatacggtcagaagcaactactttgcaataaatagcactattgacgtagacattttcttaaaatattggtcctcaatttcaacaatagaattttatttactataaaattatagtagcctacacatacacctacacacacacacacatgcacacacacccacacacacacacacacatagctacccagggctcagtgtagcatctcttcaaaggcagtcctagcagaaccccagccaggttacactgccctcttctctgatacagaccttgaatgttgagcagagctctttaccctaaggatagggactcctaacttgggatccatgtagagtcgaggtttggggacctgtggattccctgaaatgataggcaccctcctctaggaagagggtcctttgccagattgtgtgtatgtgtgtgtgtgtgtgtgtttaagaactaaaatgggttaagaagcacatctattctagttttgctctgatcttatgagaccaaaggaggttggaaggaacttggtcttgggagtcagatgaatttgggtttgagttgtctccaacacattttaactgtgtggccttgggcaggctacaaaacctttctgaacctcaattttctcaaatttagaataagggcaagaaggttgtagtgaaagttaagatgagataaataataagtgctaatcttcatttttctttctttgtcccatgaatactaatgaaagcaggtgcctgttgtgacctgttcttgctggctcttccctagctctcagcatgctgcctggcacacaggaggcactcaaatattgaatggatgatcggatggatggttgaatgatggagtgccttggtttaatatccagatgaaatctttgtctatagtgatatttccccaaatcatttatcttctttttttttaagaccaagtctcactctgttgccaggctggagtgcagtggcacgatcttggctcactgcaacgcctgcctcccaggttcaatgattctcctgcctcagcctcttgagtagctgggactacaggcccacgccaccatgcccagctgatttttttgcatttttagtagagacggggtttcaccatgttggctaggatggtctctattgcttgacttcgtgatccgccctccttggactcccaaaatgctgggattacaggtgtgagccaccatacccggccaatgcatttattttctaagggagatcttgatgccatgcttgcctctgctatgaccttcccaggacagttagcccctgttctgtgcaaaatctttctgggtacataaaaagattcgaggccaggcgcggtggctcacgcctataatcccagcgctttgggaggccaaggtgggcggatcacctgaggtaaggagttcaagaccagcctggccaacatggtgaaacccatctctactaaaaatacaaaaaattagttgggcatggtggtgggcacctgtaacccagctacttgggaggctgaggcaggagagttgcttgaacctgggaggcaaagattgcagtgagccgagatcgcgccattgcactccagcctgggcaacaggaatgaaactccatctccaaaaaaaaaaaaaaaaaaaaaaaaagatttgatttgcctatcccatgctgaagatcatgatctgcattgggcactttgtctatatcaatgctggacaaactacagcctgtaggtcaaatctggctttttgcctgttgttgtaaataaagttttattagaacatagtcacattcattgatttactaatggtctgtgattgcttttgtgctttagcagagttgaatagttaagacagagaccatttggaatgcatggtctaaaatatttattatggggctctttaccaaagaagtttgacaacctctgatacatatattatttacatattatctacatattatactccaactctgcaggattggtcttcaaatgccctttttatggataagggagctaagacccacagagtttagtatttcaattgagactgcaaaacttatcaatgcctagcatttggattcacgtctgtgtgattccacagcccatgttctttctactaaacactcatatctttcaactcagccaaaacctagttgaaccaccttcatctaccagtcctgccttgtgaccatggcttgcatggggaacagttcagtgatgtctcctggtggtggtgcaacctggagatcctagcatttgtcaacaacctggctcaggtcaacagtatcactcgtgtgaatgtataagcaggtgagagagtggaataaggatttcaagggctaatactgcagatggcagtaatccacagatggcagagtaatatagataggcgaacatattgctgctttccaagggtcaacacattgaggatttccaaaagggtctttgttgctgctggacatggcatccaatcttgttgggtgcccttggtgagtaatgtgtaaatatttgtacatttttagctcatagctacgggatatatttcctcttccctgggctattaggctgtaagacttttggacccccatgcttgttccctgctattatgccctttcattggccaatctgactccaacttcaagtggaaagttctttcacagtggattaatcctggtggaaatttgattgtttcaggggtttacagatgaagttctgtgctgcttctgttagcctaccatctgcccttggttcctacttctcactctatcttcatacctccgtttaatttttctaagctcttaaactggttatcattgcataaaggaaacaaaattggaaaaaaatcagctattcctgcactaattgagtgcactacagtgtttgccttgtaattgtgacaagccgacagtaagataacagtgacaaagttacagccacccaactggatgtaacagagttgggtaatttatccatctgtcaaaggatgaatctaatgaaaaatggctgtagtgttaactgtcatataaaaatggatactgtaacattgggttgttgaggggcacggtgagggttaggaaggcaaacatttttcctgatggtctgtttttgtagtctgtgtggctggcattatattaaggagtgtgtgactctcgcttcatcggttatgaagctgctgatggaaggattccatggaaaagcagcagagctgcagagtggacagggagaaatcagagctataattaactttgtatttcattgtgttctacagcagtaacccttatttctccaatgatgaaatcctatagtctaatgtggtagctttcacactctaaaaatcaatatatctttcagtttatgctgaaaatataaaacagataagagtgggcctactctggtttaagtgggggtggagaaacctggtaaaatgaagtcacattttatttttgtgccagtgtaactccatagggaaataatgggttgattaaaattcttggtctgtcgtttaattatttagagtagatgcttctaacagacatttttgtctttgtaactctttaggtttattcctaaaatattttaatgcccttgttttccctaacctttaaaatatccaaatatctctcctttttttttttttttgtctctcccctgacactagataatgttgcatctaggcacctcttatcggccaatgctattgatggttcatttgtatttctgtcttggaaacatgttcattaagaacctgtcacaagactcagatctacttcttgatggagactataaagcaaatgttaaatttataaattgttgaattctttgagttgaggaggaattgacaaactaatagaattttgatgtatattgatgagacagagtgctgatggtgatgcatataatttccaggtaaggaagaggtagaagcaaggcatagaaatctacttaatgatgcttcctagagttgttcacccccaggtgtgctgggtgtgagcagtgctgttaatttgggaaagaacaaagcatgttcacagactggccggggtcccaatgtgtactaatgagtgtaccaggtaataattagtgaaagtctttgtgtttgctcttcctgtagccataccaagaaggcaaggggttgatgggctatcatttctgcacagcttctttgctgtgttttctcttaagcccatgtgcatttttattattggttatagtttttgtgtatgtgtgtagtggcatttgggggtgggtgtacataaggcttacatcacttgactgccagctttactgagctcacatgttgtccttatttttgtgtttgccagggagaaatgcctgctgcctctccagttggctttggaatccaagaatgtgaagctggcccaacatgctttggcagggatgcaggtatggctttgactgaatgcaatgggatgatagaaattgacaggccactttggcattgaaagggcaaatagttaacattttaaatactggctgtttaaagactcaggcagaaatttgattgaactaggaaataactatagagaataacaggattttcttatattcaccagaatttctctgtacacagcattatttcgttgaacctttgtgatcagacactgattcatgtggacctagctaagcccacacagatagggattttttttgtgtgtgacatctttcaggagagtaagggatcccaaaaaagagacgacaagttcataccaattcaaatcttgtatactttcaacatctatggttctatataataaaaattgatggtaaactggaaagattttgttttgttttttattccacggttagattgatgaatggattattatcttttatgtccagagcaagactaggaagaaaaaagaaatttggtttaacaagaaaagccagatttgcttgaatacatttttttggtttgtgttttacaccaaacataatggatctaattctgatggtaaaaaggtgatgactatgtaaatatacatactttttaaagtggttggcctctaagagaaaagcactgtgaagttgaagcctgcaggagtttgttcagtgtggcgatggataaaccatggtggcatttgtcagattttttttatgtcagtatcaactgcttcatagttagctttttgagttcagagaggttcccaataccttttaagagataaaacctatgaaatagtgagaaaacagttctttttcccccagcagattggaattaatgtatatttttatacacagcagcatttgaatattttaaacattagcaataatgttattaaaaaccttttgcttttctccaaggtaattgggccaaccataaaaatggttgagaatttgttttgatctgtcacttt

SEQ ID NO: 134 - DNA, 6000 bp, Homo sapiens
agcagacacagcttagctctgttccatgtggcatcagctggcttgactgggctggagaatctatttccaagatggctcaccacgcggctggcagctgggctgttacccagagttcatagctcctctctgtgtgaacctctctatatggctgcttgggcttcctcatagcatgatggataggttccaagagcatgtattccaaaagacaagaggtcgaggctaccaatcacttaagaacttggtcccagaaactggcatgatgtcatttctgtaatattttattgcttgggaagtcagagttctcctagattcaagaagtaacatagaccctgcctctcactgggagaagtatcaaggaattttcagccatgattaatctaccacacagagcaaagatgagcatacgggtcttagttaccacaacatattgcatctcaactagtatcacaccagatgcatttctcaatcactgcatttatctatttggtagtgactagcctgtgagctccttgagggcagggatcatgtcttatgcatcttagggtaaacaaaatcctataagagcatagtctatgcttcataaatgctcaaggaaggaatgaaagagagctgagttccagtcctggcctctgcttcaaagtagctctgttagtctgagcaggatgctgaactactccaggccttggtcccatctcagtaatatgaggagatggcatcatcagaggatcccttaagtctctttctttttttttcccctagcactaccattgtgttagtccgctcaggctgctataacaaaatattttaaattgagcagcttaaacaacagacatttatttctcacagttctagaggctgggaagtccaagatccaggtgctggccaatttggttcctgatgaggacacttccctgccttgcagatggccatgtttctcctgtgtcctcacatggtgggaaggaagaggtggggggagggagagagagagacactaatcccatcatgagcgctccaccctcaccacctcatctaaacttaatgacacccaaaggcccacctcctgataccagcacattgggggttaaggtgtcaacacaggaattttggggggacacaggcatttaatccataataaccactttactaatctactcaagataatgatttcaaaaataaagagagttcggatacaggtctcaaatgaggggagtccaggaatcaagaaatctgagagagagtaaagcaaagagtagaggaaatgggattgttctgccaacaaggacaagggactctagagagaagagggtgaaatgaggttcagatacaaatacataaattacgatcgtagtgcttggaatagaaagaaaggaagttgaaggaggcttttttaaagtttgaacactttggactggggactatttggccacagtgggtggcagagtgtagtaaatcaaagggaactccaggttttgtacctgagtgactgaggaatgcgaattcatctaacatcagcagtagttcccaaccctgactacacggagaattacctggagagctttgaaaaaatattgatgcctgggcccctctcaagatcgctcaattcagaatttctgttctgaattgttctgttttaatgttccagagatggagcttggaacattagtttgtttttttggaggctcccaggtgattccactgtgcagccagggttgacaatatcttacctagagttaaagtcactagatttctggctgctatggaatcataaaaattggaggatcaaatgccgatagctaccaaataacatcatgtatggtttgtggtgtatgcagaaaaatgacctcccaaagatgtctacaacctaatccttagaacctatgagtatgttaggttacatggcaaagggaattaagttttcagatgaaattaaggttgctaatgaactgaccttgaaatgggggagattatcctggattaaccaaataggcccaatgtaaacacaagggcccctaaaaagtggaaaaggaggttagaagaacagtcagagaaatgaaatgttgctggctttgaagatggagtaagtctgggcgcggcagctcatgcctgtaatcctagcactttgagaggccgaggcgggcagatcacttgaggtctggagttccagaccagcctggccaacatggtgaaacctgtctctactaaaaatacaaaaattagctgggcatggtggtgcgcatctgtaatcccagctactcgagaggctgaggcaggagaatagcttgaacccgggaggcaggggttgcagtgaacccaggttgtgccattccactccagcctggggtactagagggaaactccatctcgaaaaaaaagaaagaaagaaagaaagaaaaaaacagatggaggaagatgccacaagtcaaaaaacatgggcagcttctagtcgattgtcccctagagcctctaaaaaagaatgtagctctgttgataccttgcttgcccaatgagacctgtgtaggacttttgacctacataactgtaaggtaatacatttatgttgtttcaagccactgaatttgtgagattctgttaaaacagccccaggaagctaatataggtggtcagcttaggaaggtttcatagaaaatgttaattttgataaacttttgaagggacattattggtggagaaaaagatggggagattgatgttggaatttgagtccatcagaatttttttttaacatttcaaggatgtgtgatacctacctagaatatttataagccaaagctagaggaataaaacagtattatgtaattggtgctaaattccccagtgaagtcagaggcaaggcattctctagaatttttctcagtaatgttacttgaattgtgtgcaacttcacagatttaaaggctgacaaaatacttgctttacctggttggttttaaattacttaagtcagtacagaaagcagacagaatctccagcttccacaaagcccacccctgaatgtcacctggagcttaatattcttatcactctcctttaatcagatctgtggaccctgctgatttgttttcattggatccttctgaataaaaaataattggatcatgagacacacatatacacacagagacagacaagaaaacagacacacattgagacaggagaaatagagcaaaaaaaaaaaaaacccttccatatgtaccttttttcattaaaacatatttattgaggacctgtatatgacatgaacatacatcatgttagggttccatcagtgaatgagacaggcaaggtccctgtctttacagagctcacagcctggtggaggacatagacaaataattatgcaatttatagcagagtggaaaatgtaagttgctatgagggaatacagaaggggcaaccaactcagtctggggatgggaagggaaaagtgtgttggggaggctttctggagaaagagaacttctacgccactcactgtcaaagtgtggtttttggatcagcagcatcggcaaaccctgggagattgtatacatggacattctcaggcccattaagccacacctattagggctaaaattctaaggatggggcacggaaatctgtgtttcatcaagccctctaagtgatttagatacatgtaaagttcatcgagaatcagagcatcacacctgaactgcacattagaatcacttgggtcactttccacagaaatgctgtggccccatgcccagagatattaatttaattggactgggataaagccctggtatcagtactttctcaagtctcaggtgattacgatgtgattttactgtgcagtcagggttgaggctacttctgtagaacagctgaggctgggggctaggacaagggctggaaggatcttacaggtggtgtgcaaaagcccagaggtcagagaaagcctgatgtagtgtgtttggggaccggacaaggctacatacaacaaaaccccatgatttaaaataaggtttgtagatataagttcatttgttcattgtagtacttcttaaactttaacaagcatagaaatcatctgagggtctcatagaaacacacagattctgatttggtaagtaggagcaggggactgaggttctgcatttctataagatcagcgatgctgatgttgccggtctgcagactgcacctcaccttagcaaggttctattgccccagctttccctgagggtacatgtcagtggatgggaactgcagaaggatgtatctatgcattagtcccagggctgacataagggcacctagttggggtgaactgtggatgcccattgttgtgtggacatgttttcatggtagggaggaaagacgcagcctcgcccaacctcctagcctgctcttctgattattatccatcaaggtcgtactgcttttagctcagcagtaactcccctctttctctcctcgtccctcccacgccaatctagctgagtgcctcccccggccaggccagccgaccagatcattaagtgaccgccggagtgctccgtaacgcgccagccagccagtgaggcgctgggcgaggcgggggctctcctgggacccgtctccctcttcccaccttcccccgctgaccgcggcggtgcctgcggcagagcctccctctgcagcagccccttgcacttggctcgcacttctgggcgctgtccatggttgcagcagctttcggcgcgccacgtcaggaggccgcagcacggccctgcgattggcggaggagcccctcgccatacccctgcacctccgcccacgcgccacggcgcccgaggcgcgtgccagagagcgtgcccggcgcgccccggggctcctgggcggcacacccactttccttattagggcagagtcgggtgcccagagccggcggccgggcgaggggtggggcggggagccctgggcgagacggtcgagggcgcaagcacagcctccgccgcagccgcctcagagcggcaggagggagcagtcggtcgctgcgccccggcgggccactttcccgggaccccgctcgtcttccttgggccgagattttccactgcgcccctccgagtacccgggttccaaacccctagccacgacatggaagaatttttgcaacgcgccaaatctaaactggtaagttgagtgagcaaagctgtgtgtgtgcgcgcgcgcgtatgctaatggaaaggtggagaggaaaaggtgttgcagcagaggaggaagaaacaactttgccacggagttatcagggtgtgcgggttgtctcctggaagaaatctcaggaactctggctcttaaagctggcaatctgtctccagaatcctccaccgcaaccagacgaggtgcagagctgaaggaggttgtggcctggctgaagttgggtcgcttcagtccagcttcggtccctaaatcagcagtttgctcctgaaagctaagggataaatgggtgtggtcttccttgagataaagagcccagccttctgcagatgcattacgtgtaagtgtaaaaggaaaaaaagagacccttagaactgtacttcagctggaggtgacaaaagtgaggaagtcagggtgctgggtagcaaggacatgtgtggtactggagaatccacagaatagagcttgctccactgcaggagttagggatattctagtgtgtcttgtgtctcgctaattcctgttcacatctgtaaattggggcggaggcagaaggggaaagctctaactgttggtgttctggagtttaccagatcatcgttctcccgggagcagacctgtgtgttagcccatgtttaccatatcactgtccaaacagtgaatgggcaactccactgtgtatgttaacagttgctacacattctgaaacaacagactctagcagtttcttaattccaaactgttttggctctccagcacagcagtaataaacataatggaaatgtttctgttttggcagaaaaaaaaagaaaagcc

SEQ ID NO: 135 - DNA, 6000 bp, Homo sapiens
agggttgtttaccactgcccaagggtgcccaactctcccatttggggcaatgttgaccaagcagatttaccctccaaagggggagacaataccacttagccacttgggcctacagatagtctaaaaaatttgggccataagagttaataagtgggaccctggtttatccatcagtctcttatgaagtgggtcatgatgactcagtctccctgccaatccacctgcctatagcgagaggtggcccagatcccctctgtgatgtctctgttcataagcggtagcccgtaaatactgctccttttccaccacccagaagcaacctttcccttgcatgatttctactgtttcatgccttgtgccttcccagtagtgtgagacatttcccaggggcaagggactggttttcttttctaggactaggtgttaagaagatgcacacacatctcacgcagctctgggttcaactctcaactctgctacctacttggtgtgtgatctgtaacaaattacttaacctctctgtttcctcctctaaaaatatgggtctaggaagaataaaaccttcttcactgtgttgttggggggatatgatgaaatactgatgtgcttggcacagggataagtatggagttcagttaagtgggggattttatttcaaccactctacaaatatttattgagtgcccactatgtgacaggcattgaattagggaccaggaagaagaaatggggcaagtgctgtcttatgtgatttagcttttcaatggcacaggcagaatggcatcaaatggcctgtttctgactccactgcctccacgctgctgtgggtggcctgggcctgctactttcaccatctcatcccttgtggagcttacatcccaaaggtagaggggaacagataaaagattgtacggttttgaattgggacaagcccagtaaagaggaagcatagagtgctttggggaaaatactggaataagagagtggggacacatttgaatctgagggggtcagagttacttgtgagttactttgtgagtaactcgggtgcagagacctgtggataagcatcagggaccccaccttcttcctttcctctcttttctctacatccctagggatttggagcttgctctccagtctggcagcctcgagggagggtgtacttaggtcatagcatagccctgccctgctgggccccgccatacacaccctctagtggccacagcgcatgccaggcactaggctggatgggccctaggaatccaaggacagcaggactgtcactgctcttcccatcctgacattatctccactcagatgcagtggccctgtaaggagggctgcttctaggtcctcttgtcacttaattttgtcagccacctccagcatgattcttatttccactgcacagatgagaatcccaaggctcataaagttgagggaggtaagtagggtcagtactgaatttaggcccactggactctggtttcagtgagcttcaggtggcatcgttcctgagcacatcaggaacgatgccacatctcccagtgagcaagagatgatgccagattttgccattactgcccagcaaagaaggcagatccccccagaaaggtcactgcttcaatctctccttggtctgaggctgttggggcatctctcagggcacttccccaggaactctgcagattgggatgccatggtacctcagagaggcatgggggtggaagtgggaagaagggagcccctaggggtacgtgctgagcatctgtagaagcacacacatccctgccctcaggaggtcctgcaggttacctgctggtaatccttcctgcccggcccatttcctttgcttcccattacacaagcataccccttcttcagccaaactggctgggttttaatccggcatcggctactaattataagcttgtgcaagttacttttggcaagcctttgtgcctcagtgtctttatctataaaatggtgataataggccggacgtggtggctcacacctataatcccaacactttgggaggctagggccggcagatctcttcaggcaggtcaggagttcgagaccagcctggtcaacatggtaaagccccgtctctactaaaaatacaaaaatttgctgggcatggtggcgcatgcctgtagttccagctacttggcggggctgaggcaggagaatcacttgaacccgggaggtggaggttgcagtgagccaagatcgcaccactgcactccaggctggggatagagtgagactccgtctcaaaaaataagcaaaaaatggtggtaacaggccgggcgtggtggctcacgcttataatcccaacactttgggaggccgaggcaggcggatcacttcaggcaggtcaggagttcgagaccagcctggccaacatggtgaaaccacgtctctactaaaaatacaaaaattagccgggcatagtggtgcatgcctatagttccagctatttgggaggctgaggcacgagaatcacttgagtgcagagctgagatcccaccactgcactccagtctggggacagagcaaggctctgtctcaaaaaaataaatacattaaataaaaaataaaaataaaatggtgttaacaaccacagctatccccaaaacgttgtattctggggcctcaacccctgacactttgattcagcaggtggacctttgaaccacattttggaaatccctgcctaaagagtatagtctggcatcacagacctacacaccacttccagccagaggatgagcaggcgtgctggttcatgcctctctggttttagcatgttagcattgtcaatgtcatcctcgttttagtggcaagttacatgagtgagctcctgtgcctcagttttcctcatctgtaactggagataataatagtaactatgttaagtccttatatattaataataatagtacctatgttaagtgttgtgagcgttaactaagtcctggaacattgccttgcccatagtaacgactcaatacgcacgaactattattattgtaatacacagtcaaagataatccacaaagagcatacacggggataaaagaaaatacactgagtttctgtttgtattttaagatgtattaatttccccatgggcgaaaagtgactgaaaggggccacaagacaggcttctggggtgcaggtcaggttgctttttgggtgctggtgacatcatgtgtgtttgttcacgtgtgaaaattcatcctgctgttcgcttgcgatttgtgcatttaacgtgcactatctccagggaccttcgtggttctgtgaagcacgaagggcaagcatcctcatccgcggtttcaaacaagaaactgaggctaggaccgctactttaatttggccaaagtagtaggggatgggtgtgaggaagtgtctcagtccgatctttctttcggggagcaacggccactctcagagagcgcagcgcgaacagtacctggttccaggtaaagctcagcaaagggttctgaatcctccttgcaaatgccacccttcccccagcgcacacagactctgggcacggccgggggttcgcaccgccgcgcactccccaggctagctccacgcgtggtcactctccagggagacccgcccgccggcgccccgcggtcaccgcgggggaatggcgcccagccccgggccaatgagagtagcggaatttctttcattcagcgcggggccaggctcctgcccggaaaggggcggggcgccgcgccgggggtggggccgccgcgcgcggggggagagggcggggccggcccctctgcctggccaatcggcgccgcgcccggggggggaggggggcccaggccttttttcccctccgcgcgggaccaatcccgactttacaagcttgaacttttgccaccctcggactagcgagcgcgcccgaggaggtaccccgccgcgccggctccaggggcaggagcggccttaacccttcccgcgccgggcgtcaggctgctgccgccgcgcccccgatcccgcccccaacccacccccattttcgcgtggaaacctctctagggaaagcgtgatccctcacctacagccctctccgaggtgcggagagtaaacttgagaagggagaggaagcacccggcctggagggggcccggccggccggcggcccgcctcgctccaagggagggccgtggcgaccgagaggagccagcgagtagacactccccgcctctaccccaccctctccatctccccactccgggcgagcctggagccaccgtacgcaaagcgtcctgagctccctgtttggcccggcagagcgacccccgactttgtgcaaggagcgtagagcccctagtgcagtcacggaagatccgctaccccaacatatccgccgccccctgctcctcagaggctcaaccctggaaggcacacatgcacacccatttttattagcctaccctaggatgggggtttggaacaactttaaagtgcaaagtgtgtttgtaagtttgtgcacaagccagggagaggcaaagcgccccgtttgcgtccgagtctcagtgggtccgccgagccttgcgcgcctgctcgtggctcgtgtaaccctgtgtgtgtgtgtgtgtgtgtccgcgcgcgcgtgtgtgctcgctcgcatccgtgctctgggcgcaacgcgaggcagaaagcgggccgcgggcgctgtcaggccctgggcgggggtgccggggtggtgtggggcgggggcccgagctcggcccgccccgggagccggccccttggagcctccggccctgcaatgggacgtgttctcctttaagagttaagaaacttgaaaccttgtttgcgcaacaatcagcgccgcggagccgccaaagtgtctagactggcatatgatgggaggcagccaatgactccgcggcgctcctccgggggccctcagtgtgcgtttgaggagaacaaaaaagagagagagagccgagcgggggagcgatcgagggagctgagccgagagaaagagccgccgggcgctgcctcgccagacctcgctgggaccccggggccaccgggaggcacttttgtggaggggggagggggggcgacctcggcagcctcggcgcacgaagcgtccgagggcagcgtggggcgggctgcgacctctgcatcggtggactgcatttttaattaaggattcccagcagctctttgggatttttacagcttccactcatgtgttgacacccgcgtccaggagaaactcgctccaagtgcatctagcgcctgggacctgagacggcgttggcctttcgtgcatgcaaatccagggatttaggttttgtttgggatttccttttctttctttccttttttttttctttttgcagggagtaagaagggagctgggggtatcaacaagcctgcctttcggatcctgcgggaaaagcccatgtagttaagcgctttggtttaaaaaaaaggcaaggtaaaggcagggctttccagacacatttaggggttcgcgcgagcgctttgtgctcatggaccagccgcacaacttttgaaggctcgccggcccatgtggggtctttctggcggcgcgccgcctgcagcccccctaaagcgcgggggctggagttgttgagcagccccgccgctgtggtccatgtagccgctggccgcgcgcggactgcggctcggcgtgcgcgtgttcccggccgtcccgcctcggcgagctccctcatgttgtcgccctgcggcgccccttcgacgacaggctgtgcgcggtctgcacggcgctccgcggcggagcttcatgtggggctgcgacccgcgcagccggcgcctcgctgagggaacggacccccggtaaccggagaccgcctcccccccacccctggcgccaaaggatatcgtatgttcaggtccaaacgctcggggctggtgcggcgactttggcgaagtcgtgtggtccccgaccgggaggaa

SEQ ID NO: 136 - DNA, 6000 bp, Homo sapiens
tctttcaagaagctcagagtatagcggggcacaggcatgtaaagaaacaaccatgatacagcacaaataagtgcaatgatacagacatgtttaatatacagggatggctcagagaagggagtgattagattggctctgcgtctcagggacaaaagggtggtcaggaagggcccaatagtagaggatttgaactaggtcatgggagatgaataggattttataaagtaatgataataacaataatagcaaagacttacaaagtacttagtattggccagactctgtaccaaacactttacatatgttgactcactcaaatttcataataccttataaaacaggtattattaatccccattttatagattaagatggacacagagaggctaaataacttgaccaaggtcacgaaggtagtaagtagcagagctgggattttagtaaggcagtctggctccagagtctatgttcttaattattgcattatattgcctccaagacaagatagtaagggaattccaggcaaacaggacagtatatgcaaaggcacagaggaaggaaagagcacaacatctttggggaattgtgaatggttgacattggatgaggcataaataaaaagactagcaggggatgaggcaggcaggcgccaggtcatggaaggccttgggtgtcatgtaaaaaactgtgatctttattgatgggtaatgagaaattattgaaggattaggcaggaaagtgacctgagtagattttcttttctatttgagacatatttctctggtgtaagagtggaagggaggtgaatgcgggatgtcaaaggcagggagacaagtcaacagaccatagcactgctctagatgagaagtatgattctgaacttaaagtggaagacaatcaagtgagtatgggcaagaaggatttttaggaagtaaaactaaaaattggggccaggcgtagtggctcatgcctgtaatcccagcacttcaggaggccaaggagggcagatagcttgagcccagaagttcaagaccagactggacaacatgatgaaatcctgtctctacaaaaaaaaaaaaaaaaaaaaaaaattagccaggtgtggtggcatgtgcctatagtcccagctatgatgtgatcatagtcccatgatcacatcactgcattccagcctgggtgacagagcgagaccctaaaaaaaaaaaaaaaacaaagaaaaaagaaaattggatatgagaaaaaagagttaaggatggttcctagatttctagtcccagttacttggtatacggatatacattaatacaggagaacaaggaagaggtttggaagaaaagctaatgcatttaaggggaatgttattaaatatgccttttgttttattctttttttttttttaaatggtgtctcactttgtcacccaggttgcagtgcagtggtaccatcctggctcactgcaacctccagctcccaggttcaagcaatcctcccagctcagcctcccaagtagctgtgactacaggcgctccccaccatacccagctaacttttgtattttttgtagagatggggttttgccaagctgcccaggctgatctcggactcctgggctcaggtgatccatctgccttggcctcccaatgtgctaggattacaggcatgagccactgagtccagcctgttgttttattcttattccataattttcacatcatttattttcatcatcacacatagtgattttcaactagggcacgagcaggaacccagaggggagagcggtaggaggaggtatattagaatatgggtgtttgggccaggtgccgtggctcacgcctgtaatcccagcactttgggaggccgaggtgggcagatcatgaggtcaggagttcgagaccagcctggccaacatagtgaaaccccatctctactaaaaatacaaaaaattagccaggcgtggtggcgggcacctgtaatccccaccactcgggaggctgaggcaggagactcgcatgaaccagggaggcagaggttgcagggaggcagaggttgcagtgagccaagatcccaccattgccctccagccggggcgacagtgcaaaactccgtctcaaaaaaaaagaaaagaaaagaaaagaaaagaatatgggtgtttgtaggtgtaggtgagtgtatatgtagttcaactattccttcccacctttttcctggagagagtctgacatgatccctcattgagaatcattgctatgtacaattatccatgaatattctgacaaggtagagacagttgaaaaccttgaatgtgttctatgcagtcacagaactgcaagactaggacagactttaaagatcatctagagtttggtagggctcaatcaagtgctgtctggaaaaatgagaaggcattttcagttatcagaatgggaggtgccattggcattaagtgcctgagagccagggatgctaagtatcctgtaaaccaccagcagctccaaataatgaagaattatcttgccccatacaacaatagcaccccttgaagaaacactgatatagttcaatctccacgttttatagatgaggaaactgaggtcttagagaagggactgacttgctactaaagatcacccagttaccagtaaggcctgtttatactctccttcactgctttccaatatgggtctcctaagcctgtgggacatccagaaaaggagtccaattgagtatatgtcaagtactcagaatgctgccttgctcttacaatcctttgcacattttctctagccccagatcctcctcccaccttctgaaacctaggctggaggtgcaggtttggcagttttagcacagaaagcctaaagaatggataatgtcatcctggccaaatacataaaatgtgacagaactctgaggagaacaaacattaggaacctagtggaggaagaagaattggtaaaagaaaatgaaaaagtcagaaatttaagaggcaaggttcaggatgacaaaggggactaagtacaagttgttttgttttgttttagtaaaataattactttagcatttattgggtaactatgttgattgatacattgtatctactctttgcatcttgcttgcagacatcagactgacttcaatgtagcaagagctcattaaaacagcctctttccagctgggcacagtggctcatgcctgtaatctcagcactttgggagacaagaggcgggtggatcattttgaggtcaggagttcaagaccagcctggccaacatggtgaaaccccatctctactaaaaacaaaaaatagccaggcatctgtaatcccagctacttgggaggctgaggcaggaggatcatatgaagccgggaggtggaggttgcagtgagtcaagatcgtgccactgtactgcagtctgggtgacagagtgagaccctgtctgaaaaacaaaaacaacaacaacgacaacaaaaaaacagcctctttcccagtctcagctgaagctgtaaagctgtttgatacagttctgggcagtgtgacagatgtgagagaacagcatcaaagcccaccccttaataagtttgtacagggtaggtatatagaatcatatttggtactttaacattcctaacagactacattttgcaaaagaataacaacgaaggggacttgtcctacgagctagcacacatggtgtaaaccggagtaattacaagggtgtagcaggggtgtgcagaaatttataaatgtaagtctgtacagctatgggcgaaacaaaggaggagtggtcaggtacactttgaggaggaggcataacaagaaataattcataggtctttccacaacagaacctctagcaccaccttgctatcagtcctttgcacatttcctctagccccagatcccctctcaccttcagagattcaatcgtggcctgcttgtaaacctttcctccagaatctttcttctgagggctattctggattctaggcgttcgaatgacgaatttatccattgttaggggactccgactaccttgacgtgcttgcagcgtgttctggtcaagaaagagggcagattctaaaaccccactaaagactgccatgatattttttccccaaagtaacacaattgagttctctggaagaattcatgaattatggggcctcgagtggaattgacaggaagtaagattttctctttaaaagaaagatcttccgaagaattgaaactgtaatcaatcatcagtctacgtcctgagttaggaggttcctagcttccagaagtgcacgctctagcgaggattccaacattgggggaattggcccaatattggaatccccgctagagcgtgcacctaagccctcttccaaataagattgggctgtgaaagggttaggattacattaggctcagtgacgccctcttaacaaccacctcaccacagccataatcccaagggttgccctggtaatcagcaaccgacaaccacctccagaactcagcagagggtctcacaatacgcagcatcccctagaacaaactgctcggtggtcagaggaccctacccacggctgtaatctctggatccccgaacaaggagaaaccccatcctcctcgttcccagcactcaggagcccgggtaggggcacccaacaacggtctgacgtgagacccaccaggaaaagcagccctggtagctgctgttggcgccctccagactgcaacctcgtaggctcccaagcccagtcgtctgtgttgaaactaaacagacgcttcctcccagggcggtagttcctctgaagaaactccgccggccctcgcgcctctgggccacagcgaaccacattccccagaatgcactgcgaagaaatgcgggcggaaggcgcgctgagggcggctgtagttttccgagaccaactttcccgacagcaccgtgcgcctcccgcctacggagaactacatgccccagcctgccccgcgaagggaagaagtcaggaggccccgcttcgcgctaacgcttgcgatggttgaattcccctcctcacgccagcctaggagaagaagttcgtagtcccagaggtgaggcaggaggcggcagtttctggcgggtgagggcggagctgaagtgacagcggaggcggaagcaacggtcggtggggcggagaagggggctggccccaggaggaggaggaaacccttccgagaaaacagcaacaagctgagctgctgtgacagaggggaacaagatggcggcgccgaaggggagcctctgggtgaggacccaactggggctcccgccgctgctgctgctgaccatggccttggccggaggttcggggaccgcttcggctgaagcatttgactcggtcttgggtgatacggcgtcttgccaccgggcctgtcagttgacctaccccttgcacacctaccctaaggtagggcccgtccggagcgggctgcgacccttcccttgcagcccatttctcggctccccacacgtatgtcggctctggcaacctggctgttaaatcggcccttcaatcgctgtctcccatctgtgtagctcctgttttcctccctaatcctgcctgcaccccatttctgctgtcattaccggaagtttgtcctgcactaccctgtgataggctgggggacacaaagatgagaaagacgcgatccctttcctctgggagcttgccgggctgcaggggagtcgagcactcggaggaggataggggaggatatggatgattaatgcggggtcctcacctaagggagcgtaaggggggattgtagaaagggaggcgcagatacgcgagtccacaaatgattgattgataacccttgtttactaagcgcctctcggggccaggagcgcagtcttcggggagtcagacaagtagacgattccactgtggtataaaaagcgtcacgaaggcagctcagggagtagcgagacgctcaggaatgctgtctgcctatgttgagttactgtg

SEQ ID NO: 137 - DNA, 6000 bp, Homo sapiens
tcccaaattgccgcccacaccgatgcataagcttgtgagggcagaggagctcttcaacagtttggaaactagcaatctgtcacaggggtgagggcaacccaaaacatccccacttaccctttccatgggaccccaagtccttcaggattcaatttctgccaaattcttgcctcctccttttttctgtgccctagcttctgcttgtgaattttccaataggccttcacactcgtctcttaatcttttgagttatgatttttcacctctaactttggttcttcttttttggggagattgggtgatcagtgtctccagtcagccatcttgaagctgccctaaaagttttacattttaactgagtccaacttatgcttttgatgtgttgatgtttgttgatttttatcaccaaactgaagattacctaaattttccctcatgttatctcctagaagttttattgtttacatgtgagtcaatgatttattttgacttaaaatttgtgaacagtgtgtggtctatgtctatactcatttttttgcatgtgaatgtctagtttttccagcaccatttgtcaaaaagattatcctttctccattggactgactttgcttctttgtcaaatatcaattgactgtatttgtgtgggtttctttctggtccctctattttgttccactgatcaatttgtttattcttttgccagtaccatactgccttgatcactttggttttatattaagtcttaaagtcaggtaatatcagtcatctgagtttgtttttcttcagtattgtgttagctactctgggtttttgcctttccatataaactttaaaaaaagtttgctgatatccacaaagtaactagctcaggttttgacttgggttgcacttaacctatagatcaatttgggaagacctgaaatcttaacagtattgagtcttcctatccatgaacatggaatagctctccatttatttagttctttgatttctttcaccagagtcttgtagttttcctcataaagatcttgtgcatattttgttagatttatacctaaatatttctttttaagttatcaattttaatggctgtaaaagtgcttaaaatgaaaaaattcaagatgcaatatttacaaccatcaatcttttgtgggcaggccacctgttatctatttgtggcttaccaaagtgttataacccattggttaggcatattttttggtaaagaatatcagttactatcactgagcgtgagacactaattaatctcacccattgccacttctttagtaagaactggacttgcagccactgctatggctgacattctaatgcctcaagtggagccacctttcctgtactcaaatgtcctctgtttgttgcctgtcatcccagctacttgggaggctcaagcaggaggattgactggggccagaagttcgagaccagcctgagcaacatagtgggacccaatcggtaaaaaataataataataataaaaaataaaaaaatgtttctggttgtctttgggggacaggttcagatttgggaatatttgtagggggattttagcctggcctttgttcacctggtgtagaaatcttgtttgtcctatagatcaaattgagtcctagttggatgcttggccaccagcaaaatccctatgagtcacaccattctgaagtctacttgggtaccactgcttatgattgtaccaagccctccctggcactgagggttaagtcatgcaccactatttgtcttctgccagcccaggctctcatccttcccatttaagtcagggagctccttttgactgcagtgtctttcacaaccatctcttgctacaaagaacagccactttggtgcttttcaaagatggcagtccttcctttgccaatgattctttgaaaatcttggtggatgccccctcaggggacacagttaaagagaggtaagctggccacatgtggaaatacactgcaatatttccatctccttgattctttggatcttttcctgtacatgtaccagggaatttcctttttctcatcttcatttagctgagtccagaagtcagttagtcaatttagatagtacattgaaaccagagtcattgggaagtgaattcaaatggacagattcaggtttattcacacatatactcttcaatgtaaattagcagaatcttgcaattctttctcttcttggggttgactttatagttggtctcctagggtgtgactgaatctggttcaagtattaagagtgagagtagtcagagatggtgggagaggggtgggaggagatcggcttccctttccaaggtaactgccttaagtgagttccgaagaggatcttcaaacaaagcaggaacagcctcgttacataaggaagagggcatgcttctgctgccaagggagtttgggggcttgagtgactaggaatcattcaagttttcttttatagtcctattcttattcccagattcccactctttcctgctgataattataaaatcttgtgaggccgataattcaattgactttgtaatttggcgatttgtagatgaaattgtgaatttggtttttcagttttggccttgtggctcaattaacaagatattctttgagctctgttgtttgtaaaaatacagttgtttaaaagtcataagctgataatttaggacttagtgcatcactacttttctttcagtggtccagttttaaactcatcccttgagttcattctttgagttcttcctaatcttcatattattattattattgttgacaatggccagttggtttcccagagccttgtcttcattgggtagttcaatccaggtgaccatacttggtaatttacctagctgtcatgccaagtgcttccagagcctgtattttcatactagttgaatctcagcctttattcctaatcaggccagacaaccaatctcagattcttctcatttcttcaaaattctgtttcttacagtcccacattgggttatctttattctgtctttttcactactgtccttgttggtcttattttgcttccttggaatttggggtaacaatttttgggtattgatatgactcttttggagcctaacggtcactataataggatggacaagtgtgtgtgtggtcttaaaagaaaagcatggactgtttggctggtgacttttctttgatctctgggctgtctgctcttttggctagcagagatgatccagttttcaacttggggcaggtcccatccctgccacctcatatgtgcatatggggatttacagattacagctgtaagatgtcctccactgacccggtgtcataccagcttcccagccacctgtgggatgaacaggtgttctctcctttgaaatgagaaaagaaatggagagacttttcaaagatccccaggattagccagtagctgggccaagaatgaaatccacatcttcccataccctcaatactgacctctccatcaggatctgccctaacatttgaagggcccagctcaagagcctacatgaatgccccatactatcatctaaatattcataagcaatagtcagctattgagtgctacataaaacattctctatcctcctatcttgacaaattgttgcaatttggaatttccaggagcagatactgagactgagtttgtcctgtgtggtatttattagtgatcaacagggagaggaggcaggagcaggcagagagagaagtccaaatgcaatgcggactcccccaaaccttagccaaccccactaggtgtcctagagaatatatggcccaccagactgtccagggcaggtaaaatttgtgtgccactcttcctcgacccccaggacagggcatatctttggatgaggggactctatgcaggcacaaaccttgaaaaagctgacagctggtcaacacctcctcttctaacaaatgttccttcctaatgacctgttctgctccggcaagagcaacagggtgagaggacttccatctctcccagctcctggacattctagtgctcacattcaagctccatacccctgactcaacagctgctcctggccactctcgggcctacggtacctgacacagtggctctagccaccttggggacaacagagaggcaggatacctcctaccttcaacaccctggaggcgcgtggggaattccagagtcctcaatacccagagattggactaaaacgggatggggcacatccgctttgccattagacctcttaattcctgagcaaccgggaactggaggaggtctgtaaagcaggggagtaggataggaacctatccctcttgctcgggtcaaaggtatgctatcaaagatcacactaagatgttgggagatttaaaggaggatttgcacatggaaggctcttttttggagaaagagactgagtcctagctagcattaaataaaacaatggcttaaacaatctccatgagtaccagagatttttactattagcgatattcctggtgtagccgtgtcagggctgtcactctctctgtcactcgccctgggcccagcaatcctttcccgaggcggaatccccctggcggtgtgggtcaggatcgctctccgtcccctacccgcgccaggtccctggagctgagcagagcagggcgctgtcgagcgcgttggggagccggggccgggacgagcacaaccgggagcccgagcgacagcggccaggggagggaggaggcggtgaggctgaggaaggcagtcgggcccagcttgacgcagcggcggctgcgactgagcaggccaccaccagggcacccgggccagccgcgccagccatccctccgcctcctccttcagctgctcggcgcgcgtgggagtgagtgcgtcgcgagcccgccgggggtctcaggctctgggcgtcctcggcgagcgagcccgggcagagggaggcgcacgagcgcgcgcgacagaaggaggcggggaaaggagggggcgaggcggaggcgagcgaacagagggagggacccgcccgccgcgccccggccgctgggcatgtgtgtccgcaggcgcccgacgctgccgatgtcccggggctgagccgcgcccaggtgtcccggacagtgcgtgcgagcgtgtgtgtccgcgcaggcgagcaccgcgccggccctgagcctcccgctcgctccccacggccgcggtgcatgttcgcctcctgccactgtgtgccgagaggcaggaggaccatgaaaatgatccactttcggagctccagcgtcaaatcgctcagccaggagatgagatgcaccatccggctgctggacgactcggagatctcctgccacatccaggtgcgcgtggaaccgggcgagggcgcggggcacacgccgggagcagggcggggggcctttgcggtgggcatgcgagaacaaggaacccactcccggaggggattgggggactgctagaaagccagatttcgattcctcaggcctctgagggtggggggccttatcctggcatggaggggcatggtgccctgcaagcgccaggcacgcgttatccgcgcccagtctccttcccctcgcgtgcaccctgcgcgcgcgtctcactgcgcccgggctaggggcgcggggcagctgcctccggagggactctggcccctctgggccctactccgccaggagatgggagctccgagggctgagaggggcacctgcatgtcgcccactggtatttcctcccttcttccacgtggagaaggcatgcatcagctgggttcactcatttctgtctcccgcgcccaggctccggagacgccctcagtcccggaacctgctttccgctccgtgtcggtccccctcaccctccgccggtggtctttagttctccgcgtggggcggtggcgaagtttccccagagtgagagaggccgggctgccctgggcgccagccttgagggatggagcgcgcgctgcgccggactggagctacctcg

SEQ ID NO: 138 - DNA, 6000 bp, Homo sapiens
gccattttgacacagcaaaagcgtagaatagctgttcattcaccttaagccaatgcttctacatgtcgcagccgatttagaccacgggtagaaaatgggtctggtaccaggtgtcaaggctctctgaaagcaccagtcatcatctccatctatgatttatcaactttttgtcctatatttaggaaccaaatgggggatagcagagtaactcgtctttggattcaccaggaaacatcttcagagttcaccactatggtttgctttgtttgcttttttagttctcaaactaaagaacactttggaaagattatttaaaatgcaggtcccagtctccatcctaagtgattctgatttcatgagtatgaggtggagaccaggaatctgaatatttgaaactctaaaacaaaatgtaatggttccttgaccactactctctatcctcttcttggaggcaaccactttagactcttaatacttttgtctggcatttgtacatctctgtaattctccagtgctatcaagataaattacaaagtgtcaggggtctcctaacctacatctcagattggccctagtgtttcacatttgatatcaagcaaatatttgttatggacccactagaggaagaaaaagaacatctatgaagtctttactatgtgcaaggtctttacatgcaacatctgatcattgactacttactactaccctatgaaccaggtattttcctagtcacaggtgttcaagggggtggaggtcagatttgaatccaatccagtttggctgaaaacttaatgcttgttccaggaaagcacagtgcagaactctggtagaatctagattccctgttctcaaagagattcctatttgggggaggttggagggtggaagcggggagtatgaaatagggagaaatcttacgaggaactctataatgcaattcattccacatatgtttattgattactttttctaatcaaagtccagtgctagacactggaggtgctacataaatggttctctttcttccttctgtcccttctcccctaccaccttcctgcagagaaggcagaatgagataatacgagtaaagacactgaggaattgctgatgaaagatttggaccccagaaccaaggatgagacagtcttccaattcagacaggaaaactcttaggaggctgctaaccctggaaagaccccaagttacgcaccagtagatagtaaacaaatcaaagaataccaaatgtacttggatgacaatcagaaagcctctcccgactccactttcaaaaatccccccataatagaataatcgcatcttaaaagaacactcatcaatcaaagacagtcttaagagtctctcctttatctctataaaactaacacttctttcaaacgacttctagtctcatttggaaggaaagtgatagtagccaactcccttagcatagtaacgtctgaataaacagcctttgattaattctataggtggtcttcctccttttggcaaaatgttcacaagctctcaccaagtttaaacgttcactctcaaacattagcaagtctttgctctatcccggcggacccagtaggggtaatgatgaacaatatggaaactcaaatccagttttgtcaagaggagggtgctaagagtgattggagtccagctttgggaaatttgatcccaagctgtgtcacccttggcaagttacttgaccttagagtcatgtaaatgtcatgtggaactctgtggccaagtttctctctggcaaaatgggaataatagtaggaccccatttgcagggctcctgtgaagattaaatgactgaaaacagaggcagcagagtgtatgtatcaggaaagagcatcggtttgccatttaataaaaaagaatccatgagtccacagtgatacaagtgaataaaacaattcaccgacgaatagtgttacagtgaactaaatatggcctaaggaggactcggtacttctatatttgagtccttgtggacgaactgcaacctagcttaataggtagacaagattgaaaacctaacttagaagtatggacctaaaacaacagctaagtcttggcaatcccagtggccatattttaaccatttatacattgctgagtgttcaaactgtgtaaggcaaatgccaagctgtaaccaatccagctgttctgtacctcacttctgatttctgtaagtcatttcccttttttcctctataaatcttcttccaccacgtggctgcgctggagtctctgtgaatccactgtgattctgggagctgcccgattggcgaaccgttcattgctcaattaaactcctttacatttaatttagctgaagtttttctttcatcaatggagatgatggaaagagtgcagtttttctgagtagaatacagactaataaatgtaggatggagttagaccttgccactttgccaccatcgtgacaataattgatttaaacaatcatcatcatccttatcatcaaaagatgctacatctagtgggtaaaactatgtctcgaaatgggctagaaattatattaaaataaaaatcctcagctcccccactttccaaagagagagattaggaaagaagctagtagcaacagctgtctacttatgtcacattgtaccttttttcatgatcatatgctcaagaatgagtaaggttaaaaaaaaaaatctaaaatagtgcttaatttgggggtgggtggaagggatgtgaatctcatctcttatcagacctgccacctctggcaagttacttaacctctgtgcacctcagttttctcttctgcaaaatggggattgtacacttctactcatttaaaactttgctatgaagactaaacaagtttatatttgtctaatgcttggcacacattcagtaactttgctgttgtttttattatatgcacattgcttagactcgcgtaaactctgtgaaagggaaataatcttgggactcccaaatcactaaggtaaagggaaaagttaaggtgggaactgcttagggcaaacctgcctcccattctattcaaagtcatccctctgctcacagagatagacgcacagctgattgcttcctttggaaaggccaatcagaaacccaaaagaatgcaaccctttgtgtcttatctacccataacctagaagcccctccttgcttccagttgtctcgcttttctggaccaaaccaatgtacattttacatatattgatgtctcatatctccctaaaatgtataaaaccaagctgtgtcctccaccacaccttgggcacatgtcaggacctcctgaggctgtgtcacaggcacgtgtccttaactgtggccaaataaacttcttaaattgattgagacctgtgtcaggtatttggggttcacagctccaaatgaatgttgcttttatcactctgattactgggcttaaaatcctccaatagctttgtgtccggaattggttccttcccgtgggttcttaatcgtctcgctgacttccagaatgaaactgcagaccctcgcggtaaagatggcgtgaccagaatttgttcctgcagatgttcaaatgtatctggggtttcttccttccggtgggttcgtggtctcgctgacttcaggagtgaagccgcagacttcacagtgagtgttacagctcttaaaggtggcccgtccggagttgtttgttcctgcctgtgggttcgtggtctcgctgacttcacgaatgaagctgcagacctttgcagtgagtgttacagccctcgaaggtggggcatacggagttgttcattcctcccagtgggttcgcagtctccctgacctcaggagtgaaactgcaaacctttgtggtgagtgttatagctcataaggatagtgcggacccaaacagtgaacagcagcaagagctactgcaaaaagcaaaagcacaaagcaaccacaacctggaaggagaccccaactaggggccactactggcgccggtgtccagcttttattcccttatttggccccaccctcatcctgctgattggtccattttacagagtgccaattggtccattttacagagtgctgattggtccctttttaaagagtgctgattggtgcatttacaaacgtttagctagacacagagcgctgattggtgcgtttttacagagtgccgattggtgtgtttacaaacctttagccagacacagagcactgattggtgcatttacaatcctttagctaacagaaaagttctccaagtccccacctgattagctagacacagagggctggctggtgtatttacaaacctttagctagacacagagcgctgattggtgcatttacaatcatttagctagacagagaagttctccaagtccccaaccgacccacccggcttcatctctcagctttacattgattttaggttaaggatagaacaaaacaaaacacccacaactccttaagggatggagagcctccaatggcctctccttgactcacctgaagccctgggctgcaggaacctcacctgtctctattcgttaaagtctcagctcaaacaccactgtcccagataggcctcgtgaccgcaggactagaccacggttctctgcggagggcgtcagctccgtgagccacccttccagcacccactgccatggcgaatatttgcttgtttggccatccagggactgtttgagccccaagaccgcagggctcggggtctgtctttgctcaggacgataacctggggactggacagtaggccctcaggccttgggaccgctcaaagtgaaccggggccgggtgggggacccagggctctgcagccttaagaacgcctgtgcccccgggacgcaggggtcaggcccggcccggcccagaccgcctctgcctcctcctccttttcctccccgcgcccgcttctcctctgacccctcctcccgctgctcctcctccgcctccttcccctgcccgcgcccgccctactgccccgtgccgagtttcctgtttaagatggcgtcccccgtagcagcgcaggccgggaagcttctgcgagccctagcgctgcggccccgcttcctggcggccgggtcccaggtgagcgtgggggcaggagctgcgggcgccagcagcggcgccggcctgcccgggcttccctcgccccctgctactcttggtctccgcctgaccccctgcgcggcccctcgggcgccccacttcgggaggtgacgcggcgccgggtccaggcgcagcagggaaccccgctccagtgtggggcaggggcggcgcggcggcagccccgggtgcctcggggtatgagcgacccaacgcactagagtctccgctgtctgcccgcgcagactcatggcgaaggcgctgaagcaggcgctggacgcaagtttaagaaaagtttcttggaccgggttttggagccctgaggttttattgtcagctctactaattctgcttttcaaacttctggcactaaccctgagcacgtttagaccacgtgataaacatgcctggaaacccgtttcagcccaactaggaactcaccccctagggtgaacttcctgcaggctacctgcttttgcagacttttaatgtgcctgagttggtcaaatccgtgggtcaaggagaaaaatgggaaacgatctttctcctctttccaatgaaaaatcagggctgtcactaaaacgcattagaccattgaccctgtccatgtcctccttgttgatggagaatgaaatcaaagagggtcagtggtgggctggatagcgattggaacttggcctctagcagatttttaccttctgcagatggcaagcgttaaaatagtcagaaggacttcaggaaagttttgagttggtgatgactcttgtagaaatcactcaaccactgaactggttagtctccgtagactatctctcttcccttttaaagaaagcacagtctgggattcagccacagcagagttaatgacct

SEQ ID NO: 139 - DNA, 6000 bp, Homo sapiens
tattggtcagactggtcttgaactcctgacctcaggtgatccccccgcctcccaaattgctgggattacaggcatgtgccactgctctcggccccatcccagtagttctaacaagatgccaggactcacgctaactggactgtcttgatcacatgtctttccctaaatcaatcactacaaatgatggcaggcaagggttggagtgctttcattggttaggactgggccatgtgatcccccccaccccccaaccccaaggtgagtagtgagtcatattcccaaggcagctacagggatagacagtggggcggagtggttctgttaccagcaaggcctcctgatctagacctcaagagagggttcttggatctcgtgcaagaaagaatttgaggcgaattcatagagttaagtgagagcaagtttattagagaagtaaggaaacaagaggccaggtgcagtggctcaggcccgtaatcccagcactttcggaggctgagtcggggtgcagatcacttgaggccaggagttctagaccagcctggccaatatggtgaaagcccctctctaccaaaaatacaaaaattagccaggtgtggtggcacgcacctgtagtctcagctactctggaggctgagggaggagaatcgcttgaacctgggaggcagaggttgcagtgaactgagattgtgccactgcactccagcctgggtgacagggcaagactctgtgtcaaaaaaaggaaaaaaaaaaaaagagatacaaaagaatggccactccataggcagagcagtggcatgggccactcagctgcttatacttattgtcacttctcgattatatgctaagcaagggatggattattcatgaattttctgggaaaggggtgggcaatccctggaactggaactgaggtttcctcccatttttagaccagagagggtaacctctggacatttccatggtatctgtaaactgtcacggcactggtgggagtgccttttagcatgctaatgcattataaatagtgtataatgagcagtgaggatgaccagaggtcacttttcttaccatcttggctttggtgggttttgtccggcttctttaccataacatattttattagcaaggtccttgtatcttgtgctgacctatctcatcctgtgacttagaatgcctaatctcctggaaatgcaactcagtaggtctcagccttattttacccagcccctatttaagatggagtcctggttcgaacgcctctgacagttccccagaggaaagtggagttctcttaccaaaagaaagagaatgtttacagggaaggacacaaataacacatgtcgccaatagatcctgaaggatgtccgcatgaagtcattaggacatgaagtcactgaggcctgatggcaagaaaaagggacttattccctactgttttgtggagatgggtcgagggtgtgggaaagagggtgaagtgggattagacatgtttggtgaagctttagaggataacattaggatctagggtcagagataatgttattccttttttttttcagagttacccaggctggagtggggtcagagattagagggaggcagaccacctataagaaatatataaaccctttttttttttttttttgagacggagtctcactctgtcgcccagcctggagtgcagtggcacgatctcggctcactgcaagctccacctccagggttcacgccattttcccacctcagcctcctgagtagctgggactacaggcgcccgctaccacacccggctaattttttgtatttatagtagagacggggtttcaccgtgttagccaggatggtctcaatctcctgacctcgtgatctgcccgccttggcctcccaaagtgctgggattacaggcgtgagccaccgcgcctggctttttttttctttgagacagagtctctcttactctgtcacccaggctggagtgcagtggtgggatctcggctcactgcaatctccgcctcccaggttcaagcaattctcctgcctcagcctcccgagtagctgggattacaggtgagcatcaccacgcccggttcatttttgtatttttagtagagacggggtttcaccatgttggccaggctggtcttgaactcctgacctcaagtgatcctctggtctcggccacccaaagtgctgggattacaggtgtgagccaccacatccagcctaaccctttatatatacacaaaatatatatgtgtctatatatagtatataaaacgtatacaatttaagttgtccagaaaaagtatagagatatttgtgagacggtgaggttgcctgcagtctctgccatgaatgggcagatctcttttcctgtgactaataaaatacacttgtgcctcctcattacctgggctttttaaggagggctgtgtctgggtgggtactatctggaatgccccaccttggtcatgttttggggaaatctgccccaccccaataattccagtgggggtactttctcctccgaggcgcacttctgcatcctcttttttttttttttttttaaatacggagtctcgctctgtcgcccaggctggtgtgcagtggcgccatctcggctcactgcaagctccgcctcccgggttcatgccattctcctgcctcagcctcccgagtagctgggacttgacaggcgcccgccaccacgcccagctaattttttctgtttttagtagagacggggtttcaccgtgttagccaggatggtcttgatctcctgacctcgtgatccgcccgcctcggcctcccaaagcgctgggattacaggcgtgagtcaccgcgcccggactgcatcctgtttttgttttttgttttgagatggagtctcactctgtcgcccaggctggagtgcagtggcgcgatctcagctcactgcaagctctgcctcccaggttccgccattctcctgcctcagcctcccgagtagctgggactacaggcgcccgccaccacgcccagctaattttttctgttttttagtagagacggggtttcaccgtgttggccaagatggtcttggtctcctgacctcgtgatccgcccgcctcgacctcccaaagtgctgggattataggcgtgagccaccgcacccggcctgcatcctgttttagtcacctgggataccggcctggcattgcagtcaccgcagtacgtgccttagcatcctccagtttggtgtaagcacccccagggtagtgactgtatctcatctagcttaccccctcagtgttcttactcaaaaaatatttatcgaataaataattttatcaggtattttgtgcaagaatttttgccttggggaaggtgtgtgtgactaagagcccacgaggatcccgtctaactccaagattctgcgaccggcattggaagctgatttatagtgagtaattgggaatacccaaggccactttgacttttgccgccattggatagagcagcaccctctcctaccctccctctgagttcacccatgggcagtcccagaagcctttgatggggaaaagggggtcatagtgagaatttaccttggaatgtaaagtgagccgccccttttcagtctttgcatcttcacgcgggtccgccccaaacctagaagaacgcccctgaccacttcttcttctatctactgttactccttcctctgactctggtgaccccatcccggaagccttccggaaagcgcttcccccttttccaccccatcgagttggggttatttctccttttctgggctctctcccattgctggggaggaaggcggatacgaagggcctgcatgaccgcagctgtcatcacagtgggcctggcttaccttgttgctctctcccctttcgcctttctcctttctccctgttgcagtcatggacttcactcataatacatatacatatacatatacatatacatatacatatacatatacacatacacatacacatacacatacacatacacatacacatacatatacatgtttttaaatcgggcagccacccgctccccgccctcagcccggaataggttcagagaggtgcccgggttcacttgcggagcgtgtggcctctgcgcctaacgcgcgccccttcactacacgaatgggtgcgggcaagggtataggattttagaattccaagagttgtcgggggtcatcccgtggaatcctcttttttgcagatgctcttcctggagccttccgatgcaagctcttgggctcacgcagcccttttcctcttctaagcccagagcgctttcgctgctgctgatctccacggcctcggcagatagggaggggcaggcaggtgtcagcgtcctccctttcaccgttggggaaactgactcagagaaacaaggcgacgggcctcggcggggcgggaccgtaacgggaattcaaggctccaggccagagcggaatttattgtgtctcgttttgggaagcgtgaatgtgaaatgatcgacttcggagccccaggcggagacccttcagtccccgacaagaatcgggatggggtctgggattaatgcagtaattactcgcgcctgggcattgaccccttggcaacttcgcaagatccggcagggtccaccgcccttcccttcacagggtgaccacagggctgcggcctctttaaggcccagagctccgcccccggctcgtcgccaaccccctcgccgcagctcagccagttccagactttcctcagagatgaggtcatctccccgttgcccattggctgcgccgtgccgtcagtcacaggaagtcaggccgccgttttcgccttcttcatgccgcttccttctccgcccgccctttagtccgccgatcacgaccccgatcaggcctctgattggctagcgccgccgtcacttctccagcggacagtcttcaggacgggaggcgggcgtggtgggcgggcccgcagcttccgtggctgagaggagccggcggcggcagtgtctgtggtggccgcggcggcgagagcgacggtcccatctttcccaccctcttggttgccgctggccacacgccctccgctggcggcgacttctcagctccgtgcgcccgggctggacagtgagcctcgagaggagacgcgggcggctagagccggagtggggcgagccgcggaacccggccgggagccgcgcgaggcggtgagtgagagtccgggttggggacccctcccccaccgcggcctcgccccgcctggagcatcctttttcccccccgaccctgctgcgcgcgtcctcggggggtcgggcgaggcggccctcgcgtcccctgccctcttcttgccggccttctgcccctgccctcggggccggagtcgcagagcggcggtcactgtgccggggctgggacccgggccgggccgggcgggcgggcgcggtcgtgcacctgtgcactgcctggcagggctgtgctgcgcggggcggggaggcacggaggtcctcgccctcgcttctcccgggatgtgttttgattgcagggacggggtgtcggccgctttctctggggtcttgtgcagaccttcaggatccaagtgcagtccttgggattcccaggcaaggaggctcagctggacttgttggtgccagtatagcaaacctgaatgctgccaggtgtacagggctctgcaaatctgaaacttgatggccaagaactttacctcctaagaaagcgtctgtcaggacgctgatgcagtccaccctccccgcttcgggtacctttgatactccatagtgcctagggctggaccttttgagtcgactcccaaacctgccacttgctagctgtgtaatcttgtgccttggtttcctcgtctgaaaaatgaggataatagcaccaatcgcatacggttgtttgttgtaagtgtcgaatgaaataattcacgtgaagcgtttgacacagtgcttggcccatagtaagggcccaagaaa

SEQ ID NO: 140 - DNA, 6000 bp, Homo sapiens
ggctatgtgaggccatatttggagaatgcagaactgggaaccctgagtgctattgttggctggagcctctggccacaggagataaatggggaaaggaagggaaaaaacctggggcccctcccccactgcactgttatgggactgtccacaacatgaatgagatattctgaatcagtgtgggtgtggggacagaatactcttccccctaaaccaccagtcccaaacattcccaaggaagagaagagggtaagaagcatcaacattctaaatataacaaatacacaccatccattcttgaacaggaaaacaaccagaatgagaggtcaaggtcactcctcagacacgtgaagacctgtggtttagtggttccaaatgagtgtgtacacatataaatatagcacttgtagggtttatggcttttaggccactctgcagaggcgacagtgagtcctggtttgggaataggtatcattcctggatcagaggggtggagctgatgaatttactgtctcccaggagattcttggttctaattcactcctcattttctgtattcacaggtttccaggagtggccagaacaactccgtctttaccctgtatgaactgactaatggggaagacacagaggatgagggtaatgcctttcccttcccactcatagttaattttttgttttgttttgttttgtttttccgatatggagtcttgctctgtcacccaggctggagtgcaatgttgcaatctcggctcactgcaacctccgcctcctaggttgaagcgattctcctgcctcagcttcctgagtagctgggattacaggtgtgcgccaccacgcctggctaattttttgtatttttagtagagatggggtttcaccatgttagccaggttgttcttaaactcctaacctcgtgatccgcctgccttggcctcccaaagtgctgggattagaggcgtgagccactgtgccccgcctgtttttttttttttttttttgagacagagtcactgtatcccaggctggagtgcagtggcgcagtctctgctcactgcaacctccgcctcctatgttcaagcgattctaagttcttaacccatgtccaaggattccataagccacctgaattcacatgcaaaaaatcccaaattttgtttttgtggatgcatgtgcatttttctagggatagattagatattacaagatttccaagggcatctatgacccatgaaaagttaagaatttcactttcagctgggcacagtggctcgtgcctgtaatcctagcactttgggaggctaaggtgggaggattgcttgaggtcaggagtttgagaccagcctgggcaacacagggagatcctgtctctacaaaaaatttaaaaatcagctgggcatggtgctgtgcaccagtagtctcagttactcagaaggcttaggtgggaggatcacttgagcccaggaggtcaaggctgcagtgagctatgatcacgccactgcactccagcctgggcaacagagcgagatgctatcttaaaaaataacaataggccgggtgcagtggctcacgcctgtaatcccagcactttgggaggccgaggcaggtgggtcacctgaggtcaggagttccagaccagcctggccaacatagtgaaaccccgtctctactaaaaatacaaaaattagccgggcatggtggtgcatgcttgtaatctgagctacttgggaggctgcagcaggaggatcgcttgaacccgaaggcagaggttgcagtaagccaagatcgcaccactgcactctagtctggatgacagagcgagactccgtctcagaaaataaaaataataacaataaaaaaaattataaataactttcttcattcagcatctgctatagatgccgaatgagaaacaagggcaggggattaagcttgaaatctcattccttgctgactcaggctctctttcaccctttattcttatagagggctcaagatctgtgggtgtcagctgaagagattaggccaacacccccagcccatttatatactttggtttctggccaggcaaggatttgtatagtgtttgatttttacatagcgtaaacactcttagttctttttctccgactccagattctgatcctctggatcaccacaagtttcgatcttagctgggataacagagggtgtctcccctttctgccaggccctggctgccctagcagagtttatagctcttggctgttccccctgctgccctgcaggtctctgcttgctactcccaccatcaccccatgatttcagcactgtagccttgcctagcccaccactcaggttgggcaaagttgtaggtttcctcagaaagcaagctccctgacttagctgagcccccacagggggtgaggtaagcaagcctgtcagggcttgcctgctgcctcccacatctccctgcagtatcttaccatatctccacatactcagctagccataggctccccaatttttttggttttttttttgagacaaagtcttgctctgtcccccaagctggagtgcagttgcacgatcttgacactgcaacctccacctcccgggttcaagtgattcttctgcctcagcctcctgagtagctgggattacaagtgaccaccaccatgcccagctaattttttgtaattttagtagagacagggtttctccatgttggccagggtggtctagaactcctgatctcaagtgaccctcccacctcagccttccaaagttctgggattacaggcgtgagccaccgcgcctggcctgtgctcccagctaaaagctagaaaaagggcagataatagtgctggagtttaacagtctcctggccaggggtactggctatattctttgtgttaggatagatcctctagggtcagtgtctagtgacaatggctccgatctccctaggcctgattttcacggcccctttgtggccctgaagcagatggtgtcattctcgtgcatcagacacaaatgctaggtgtgggggaggctgagtctgagaggagaaccaagaagggggaaataagcacaaactcatttcatgctgattcaggctttcttccaccccttactcctaaggagtgcctgggaagtgtggatggcagctgtagcagtatagatggcttatgcataccctgcctctgggaggtctcggcttccagccagagcactctcctcagaggccttgggcctcaggagctgattgtctctgcctatctctccctgttcagagttccacgggctggatgaagccactctactgcgggctctgcaggccctacagcaggagcacaaggccgagatcatcactgtcagcgatggccgaggcgtcaagttcttctagcagggacctgtctccctttacttcttacctcccacctttccagggctttcaaaaggagacagacccagtgtcccccaaagactggatctgtgactccaccagactcaaaaggactccagtcctgaaggctgggacctggggatgggtttctcacaccccatatgtctgtcccttggatagggtgaggctgaagcaccagggagaaaatatgtgcttcttctcgccctacctcctttcccatcctagactgtccttgagccagggtctgtaaacctgacactttatatgtgttcacacatgtaagtacatacacacatgcgcctgcagcacatgcttctgtctcctcctcctcccacccctttagctgctgttgcctcccttctcaggctggtgctggatccttcctaggggatgggggaagccctggctgcaggcagccttccaggcaatatgaagataggaggcccacgggcctggcagtgagaggtgtggccccacaccgatttatgatattaaaatctcaactcccactgcctgcctcttaaattactacagtactggaatggggatggggagggctgtgaagtgttgccacctgagtaaatcccagcctgggagaggggagagaaaagaaagcttatggcttttgtagaagaaaaggtcctccagggccctgtgggctccagtgagcctgtggttttacatctgctgggtgggctgtgtggaggagtgctgatggaacacagcttggggacagactgctttctctctgaattggagtcacttaagggctcccccttccctcaccatctccctcatggaagtcctgaactactctgaagcccctccctccacccatctggtctgggtggggtaactgtggccaaggggagctgaggggggtaagccggatgtggactttggtttattggagactggcaaacagaaggggaggaaggagagcccatatagcaaaaacagccactctggccagggttaggctgcggccaaggtggcctggaggggatggatgaccgggctctcggtttgggggagggacttatcctggggagtacacacccattccctatgcagaccagagggacaacaacgtcagacctttccactgacctctccgttcggcctggggctactccggacagttaggagggggtggtgctgccttatctggggtgtgcaggagggtggtagcctccccctaagtaatcccccactagggtccgggtgtcgttctctcctgccctcctccgcgcacaaacaggtttgctcactcttagtgcgggaggatgctccgcggtctcccactcagttctggcctcagagtgagactgcggccgggggctcgggaaagaaggggacgcggctgggcggggcggtgactaaggtgaggggctgctcgcgggatccgcaccgcgggagcagctcggaggggcggccctggggggcaagggcgggccgcggggcggcgacgggggcggggccaggccgagctgggggctggggccgcagccgctcagccggagcgcagcgcacccagcgagtccgtctgtcaggccgcctcctctccggccgtctgattttctacccttcggcgccctgctcttcctcatgttggcatccccggccacggagaccaccgtcctcatgtcccagactgaggccgacctggccctgcggcccccgcctcctcttggcaccgcggggcagccccgcctcgggccccctcctcgccgagcgcgccgcttctccgggaaggctgagccccggccgcgctcttctcgtctcagccgccgtagctcagtcgacttggggctgctgagctcttggtccctgccagcctcacccgctccggacccccccgatcctccggactccgctggtcctggccccgcgaggagcccaccgcctagctccaaagaaccccccgagggcacgtggaccgagggagcccctgtgaaggctgcggaagactccgcgcgtcccgagctcccggactctgcagtgggcccggggtccagggagccgctaagggtccctgaagctgtggccctagagcggcggcgggagcaggaagaaaaggaggacatggagacccaggctgtggcaacgtcccccgatggccgatacctcaagtttgacatcgagattggacgtggctccttcaagacggtgtatcgagggctagacaccgacaccacagtggaggtggcctggtgtgagctgcaggtgcggctgggagccccctcggtggcaccttgggatgggactctggaggtcttaggatgacagacagagggtgggggagacagcatcaagggaagcatgtatttttccagtcaaatgtctatagacacctctgctgtctttgccctgaatgatctggctgactctgggctgcagaaggagagattgaggcaggtggtgtctggtgactcccccatgggtatgaacattctcactttaaagtctccatactcaaccctgagaggtggaaaataggatgggaagttaggcaggggagccagttcaggtcagtttcctgctggtgggtacccgcaatcccttcctctcccctaagtcctgagatcctcagt

SEQ ID NO: 141 - DNA, 6000 bp, Homo sapiens
ttctttatcattgtgttactatttgttttgtgactacagttgattgtgctgattatctgtcctttaaatttgctcttggtgggaaaatgtaagctagtcagctccagtgaaaaagactatcaagaataagatctgggaaaatatttttttaatttgtaaaagctgtatagccctacagattgtctgcgttctaattataaaagctataattaagaaagaaatcccagtatttacattgtaacttagcatcacttcttgccaatcagttcacatgaaaactatacatttctcctggaaaatgtctgaatatactttgacaggcttctggaagcaagataatccttaccaaatcttgattagaaagcataacgttgctacagtacaacgtgacagtgcagtaaaaacacacaagactgccagaaagcaagcagaagaaaatgatatttttatacatgcatctcaagtttaagaacacaaatgagcctaattacagaggatggctggcatattttgacagtcttggctattatcacattgtcacattataaacttcactgtgttccttgccataaattgtgtgctgcttttcaaccacaatgcatgataaacttaaaaaaaaaaaaagcatgtctatgaaatagagaacactgtaacattgcaaacatgaagaaaaactcttcttaaattagaattttaaatatattagtatgctttataaccttaaacatcctgtcatgatttaaaaattaggtgtcatttcgtccctaagcatttttgtgcccacttgacctgtatggcctctatcccatatatccatatacacagggtatgacaggtgcttgcaaagccctagtctatagtagagacatatatgaatgaaaggtgcctaaagtgaagtagagtcttcggctcaaaactcagctttctacatctcaagtcaatatttctaagcataataaattgaaaaatagtaataattctgaaactgggctggacatggtggcttatgactacaatcccagcactttcagaggctaaggtgggaggactgcctgagctcaggagttcaagaccagtccaggcaacagagcgagacctcatctctaatttttaaaagaaaaaaaaaatttctggaactacaaaagacttcctcttatagaaagaaaataaaggttttctatctgagccattttcctgtctttgatgtaattatcatcagtctcaagtctcaaagtttaatctaggaactccacaaattaactgatacccagagatgcctctaaggcattgataaattttaaaacctttgcaaacataacaaaatatactttagaaaatccacaagctataatttttttagtggtatctttcctatactggacatgaactcaataccttggtgtttgttagccaaaaaattacttacttaacacaaaatttcaatgtatgatatcatgtcatctgaacaagaaatatacttaagtattctccagtattattacagatgtgggtggtgttattacaactcagatgtactctttctgctggtatcgtcatggactgaatgtttatgtccccaaaagctgatatgttgaaattctaacccccaatttgatggcatctggagtggggcctttgagaaataattgggttgtaaaggtgaagtcctctaaatgggattagtgccttgtgaagagatccagagatcttgcttcctctctgctctttgccatgagaggatacaatcagaaagcaagccctccccagatacctgatctgctggcaccttcatattaagatttcccagcctccagaactgtgagaaataaatgtttgtttaaaccactcagtctatggtaattcgttacagcaacctgaactaagatatctaatcatatcaaccaaagagaacaatatccccatactttatgatgattgttccttatgatatagcaaaattcccaaatccttcctgtgattattctgattaaagttaagttgaatatagtatggaattccatggggtgtaggtggatatctatatagaaactggctagggtatacctaaagtattgtcatgccagtagcgtcccccaatttattattcaaggctcaaaatcaatgctttcagaaaacaaccagaggctatgcaagccggtagggggaaaagaggtataagagaattaagctttgatatcccaaagaacaggaaaacctctacctcaagtaggtaatttaggctaatttccgatcttccttggtttctgataaaggatttattttgtatgaagtcgtctgatctttcttcttcagtctcataaatgggaagctgttgatcaatgcaagcatatatacaagcacacacacacaattacatgtgtgtatatatgtgcaccccccccagcctcttaaccagtagctaataatttaaaacacaggcactgaaatgcaaattagaaggcattcacaactatgaaacaaccagagaagaagctctctaacctatcttccttcttccttctatcttttttataaactgtgggagaattttgagaacatgattagggaacagcaggatatgtttcgttcacctagcattcatgagaagtcttacttctcataggtaaccataaggaagaatacaatattagcaactaatttacttacataataatttatgggtaaggcaggcctatacacataaagtgattacagttcaatagatgtgtttaccctccatagcctaataattatggtcactgagatttactctgctatagaacacatataaacagacaacgttgacaaataaggattggtttctatggagtaacatgggccttccaaaataattggaacacaattcctgatttcagaactgtcaaaaactcttgaaggcaaaaaaagaaattatgaggctctgagaaatcagaaatcaaaacataaaaataaaacataagtaaaaccatgttgaaagaaatccagaagagaaattatacaatctaaccttttcaccccaaatctgttcctcctttttcttgccactccaacattgatgaaatgtagagtaattgaaatttacttcggagatacagcaagggactccaaaaggccatggagagagaatttcaactaaaattgaaaagccatacagaggtctgcataaaaaacaaacagcacaccacaaatcaaaacctttaagataaaaacttaattagcatctacaggttgaatgagctagtaacttatgccaatcttatcattacattagctgaaaagaaaacgaactgacagattaatcaaagaacaaagcagtagcttcacttcagcaaaagctccataggatcaccaaagaataactggtgtgactaccgttttctcactggtggattagtttttggcaagatttttaatgtctaaatttaagttaaacttcagtttaaagaaattaagattaacttcatttagtcacagcacacttccaaaacggtcaagcttagtactgctgaacagctgtagttgcataaaaacaacgcatagtcctaagtagggaaatgggaaagggctttaaatacaaaaacaaaaaaaacatgcacacccgataagggcacatctgaatcccatccttcttatcctatcataacacaaaacagctacggttttctgggaaacatcctggaccgctaggggaaaataacaccagacatttcaattcactgtaacgaactctcatcaataataataacctttagctgttgtgacaacacgacataaatcaaaattaaattgaatttttaaaattgttagttcctacgtttaaaaaaaagttgttttaaatacattctgttctttcaaaactgaatttcctcagatcacacaatttaagacgcctttatgtcttcttccgcttgtcacacgtctttcgggttctgaccagcacatcaaggggactctaagcaggccacgtggttagtgtttgctagaacttgtttagcttcagatccagtcatcgagcatgctaggcttggctactcgcgctccacacagtttatccaaagatctaaaccccgaatgaacctgaatagttatttgctacaatgtctttctcaaatctcacatgttcctaaaataagggtgcccatgcagtagagacggatccgggcaggatcattagataaaatacgaaggctttaaacgtccttctcccaacaatcagcctgggaccggcgtcggggcagcagcctcaccaagattcggagcgacatcctcgccaggattcgaaacacctaggagacccgcgcccggctgactcccagcccctgggaccccgtgaagacgcaaacctcgggacgcctcccgcagaaccacctgtcagagccaagcaacagtccccgccccggagcctccgagctcctgctcgaaggcaatgacagcaggagaccccgctccctcggggttctcgcggccataggcgccgcagtccactgccctccggctaaagaggtcccgggccatcacctgcccgcctaccgaccacgcccgaccctccactgaactgagtctccgtccggatcagccggcccgccacgaacccagctccagtctccggccgctccttcttatccgccctgtcctgccgcgtcgccgccgtccgagccggcagcctgctacttacctcctgacaactgcatggagtaaaccacaccgccttgttaaatgccgtcgccgccgccgccgtcttcgtcaccgtcacagtcgccgccgccatctttgttgtgtctccgactcccttcccgcccccctgccttgctcaagtctcgcgtgagcaggatggagggcgaaagcgaggaggggcctgtttgtctctcttggggttccgtaggcagcagggggcagggattaagggggggtgtgtgcggggcgggtactgagtgggcggggccttgctcgggtaactcccaggggctggctagagacccagaggcgcagagcggagaggcctgcggcgaggatggagggcctggcagtgcggttgctgcgcggcagcaggctggtgagtgcgttcgaggctggcgtcctgggggcccagggcgaccttggcccctggaatcgcagctggcagagccttctaacgggcctcggggcgccggcctgagccccgctccacgtcctgggtccccagactctttacccgcgggcagtctatgaccccgacccccttcaggcctctggtggaggcagctggtggcaagggggtcggggctgtctagaagctgctttggcggagcaagtaccttgagtggagtcggagggtcgcgtccgcaagatgtcctttgcaggccgttgcgtcctgagagccaccgagtctggatctctggatctctggatgcattttgcacagatgtcacctccctgatgccctaacgcacctttcccgagtgattacatttcacaccccctcccccaaaaaagatagttaaaatataggcccagtctcattctgagcaggtgtctccctgtccttccttccgcggccccgctcaaaggtagtaagggacttcggagttgttcgggcttcccggccagggacagagttccctctgccccttatctcatgtctggagcctgggtatcttccgtggatagactcaccgccgcccaggggagccggagccggtgccggtccctcttccatgaacttaagctgaaaccagcctcttgttgtgcttaattcttatctgtgcacccacacaaactgttaacagcccctgtgttaacatcctatgctcttcaccccttggacctattatatagcatgcttttcagaacatacacatttggatacacttgtatttgtcagtacacttcactgggaattttcccactgcttacgtgtgcttttaatgtttcctttgcatttgctttaatgagttaggctttccaactgctgcttcagtcttatgcccagaggcagaactctgaccctttttcttattagag

SEQ ID NO: 142 - DNA, 6000 bp, Homo sapiens
ataaataaataaatagattaaaatttaaaaacaaagaaataaacaaatttattaaaaatgctaaaaaatgaataaaagttttaaaaaatttttagaaagagatttaaaatgcagggaaatgtgtttgatatattattagttgaaaaaacaggcttattattatatataattttgtcatttaaaaattatttatgttttccttttttttttagagacagacagggtctgtgttgctcaggctggagtgcagtggctatttacagccctgatcacagtacaccacaaccttgaatgatttttctgccacagcttcctgagtagctggggctacaggctctggccaccacacccggttttaaatttttgactaggtaataattcacttagttcaaagagaaaaaaattacaaaaaagcacataaggaaaagttgacatcccacccctcttccatcttcccagccctcaccagaactatcaattgccaaacaggaaaccatattatttgtttcttgtgtgtcattctagataatttcctatgcatccataaataattgcaaatacagagtatttttccgccccttcccttttgcacaagtggtagtgtgcaaatgtatcatatatacattgctctatgctttagttttttattttactatataaaatttaccctattcctggccaggcacagtggctcacgcctgtaatcccagcactttgggaggccaaggtggacagatcacttgaggtcaggagttcgagaccagcctggccaacacggtgaaaccccatctctactaaaaatacaaaaattagctgggtgtggtggcgcacgactacagttccagctactccagaggctgaggcaggagaatcacttcaacccaggaggcggaggttgcagtgagctgagttggcaccaccacactccagccacagcgacagagtgagactccgtctcaaaaaaaagaattctattcagcttttaaacagctgtataatactccatcatatagatgcaacactatttaattagccctactactgggcacttaggctagtttgttgttgttgttgttgttttactattaaaaatagggctacagtgtataacctggtgctatttgtttcacacattatagctgtaagataaattcctggaattgctgagtcaaacattatgtatattttcataaatcttgtcaaactgccctcccaagttgtaccaacgtaagttttcatcagtgatgtatgcaaaggttgattctccacccttactggcctcctccgcagcagaggtagggtcaaacttttggatttttgccagcctgacaggtatttcggcctagtattaatttgtatttcttcatttatgtgttaagttgagcatcttttcaaatgtttgtaaactacttgggtctccttttccatcgcatgtatgttatctttataggaaatgctcattcgtgtattcattcattgacggtggactacacgtggacttcatgttggccactataggagctactacagggtagatgggtaaacttgagagacacagcccttgccctctcagaacatgcaatctgatggaagagaataattttgagctagctattgaagatttatggaacacttacatacatttatctatttgtgaaactatatatgtaacttatacatggaaaaatgcttggctatatactgaaattaacagaaataatttttgagtggaagtgatttttttttctttcctttgtgtttttctgtatttttcaagcttttgtaatgtatacacattatgtttgatgttaggtaatttcttttctctttgttcattgtttaagtttttcaaggttggttggttggttgatttttttacagggaacatgtgtgattttttgcaattagaacaaaaggaaataaataagaagaagacatcatacatacaccgtttacctatgttttagacataaataaaacacaggaaagaagagttctttctctagagtgacggtgagtttgaagaggaagatatagaaatccactttcagagctgggatttgctgtcataagttccagcacaggccttcactcaccagaaaagctgaggacatgtctctcttcagctgggcagcctcttctgtgtccaacaagacaggaatcaacagctctgagagctggaaatctggcctccggatccaggcctgggaatttcccttttctgatgccagcttcaggcccagtgtctaagggcgacccctgttggtgggacttaagtatgctcattattcgtgagctgcttctccaagggtggagatgcccaattcagttttaattttttgtgggtctgctggaaaccttgaggcccacagcccactcacacactaccctaactacatcctgcttcccttttctccttgtcctccacccgtctactccaggttttcctggacaactgggtctggaggcttggcgtatggagccacaggtgtggccaaccttttaaactgtaataaggcaggctgctgtagggtcaggtgctgtctttgctgatcagcaggtggagtgtggaggcccttgttttagggaacagatgtggcatcctgtcagcagactgaggatgccagacttgggcagcttgaggcaacagtgagcaggcaggccaatctactgcacaaggatgtagctgagggggctgcatcccacctgaggaaggtgggttggaggcaaatgcaaagaatggaggaagggcaggctttctgggtggcaggtcacaccattgatgggcgtttcccttctctctggagactctctgctgggagatttcggcaagaatcagaaaactaacacagcctttcttgaccagctctttcctgtctctgcatttataagagcaagacaatggattgcgaaagtgtgggcagtaaatccaccagtgtcatgttgctatatttatccataaagaattacgcggcacgccccgttcatcactgagtgctgaatggcagtgctgaatggagaactggctggagaatctggttttagacattcggagcctgtttgtaattcatcagcactgctcttttcccctgggcattggtctgtgataaagaaaactggataccagaggaatgtgctgggcatttcagtgctttgagaaaacatagccaagcacttctcagggcccatccctagacaggaccctgcctttaccacttcatctcccagatggctgtggagccagcccctcaccagagagctacctggctccactcaggcctcaaatctactgtctgttgatggaaaatcctgcatgtcgtgccaagccaggctgattcaaggtcgacctttctccatttgggccaaatgcccagcacccccaaacccctaacacacaactctttgtgggtctggtttctgggagctccttaaggaagaaaaacataaacaggaatcatggtgaggactggggagaggggccctgggtcgggggggctccattttattcggctggaaagaaaaggttggggaggagggcttgccattggatccagttcattacttcccaataaatcaaagaagggctgagaatcctgaccaccacccccagtaaggatcaagttccgctttctggaagaggcctagaggtggattgcaggacttcccagtttaaccaggtgacaaaggcttctgcttcagcccagatgtgatcacagacttccacagcttctgccgaccacagcctggccttaaagtccagacctagagtcccggagctagtgtgtactacacagaatggagaccttgcctgaggagctggttctcagagaacactggcaggaaggaagaaagaaatgtatattctaggaggcctctgctaaccaggaaagggggctgagtcacactctgaaaggtggaagaggcagagagcaggtatcaacgccctcattttacagattaaaacaaaacaagaaaaacaaacactcctcacctccctgcaaaaaaaccaccctgaggctcagacaggggaagtagctggccctggtcacacagtaggttagcggcagagttgagaggagactccatatgccctagggatgtgttgtgatgaacttttcctactggtactgtttcctcccgcgagggaatgtctagaccagccgcaccttcttgctttgacccttcagaactttggcctgtccagttaaagaggcacagagccctcctacccacagggaatgtttctaacttaccaagcacctattatgtgcttagaacttggactttcctgatctcatttaagcctcaccattctagtgaggaagcatcacagaacccattttcctgatgaggaaactgagactgggaggggttaagatcctgtacacagttgtaactggcatgtctgaatccagtttcaaaccaaggtgcctttcagtgaacacccaagcatcttcctctcggattaactgctaggccaataccaaaatctctttctcgggctactcttttgctgctgagttaaaaagagatcctgagacttagcctgggaccccgactcgcggcgattctgtggcaggcgcagaccttttctcctgtcctccactgcctctttgcctcggagggcgccccggggcgcgagcggggcacgggcgaccctggctccttggaggcccggggacttgctctccgcggtccgccgcggccgctccaccgagtcctggcctccagcgccctcacctggctgctgcgggcgggactctgcgcacccgggctccgcgggctcaggtctgcgtctcccagagccgccgccagagcccgccccggtccggcccgggcacagggcccccgccccacttgggcaaggcgggggcgcgtggagggaagtttcatcggggggcgagggagggagcttcggtgccgcgcgggcgtcaggggctcctcgggggaggagtcagtaaaagtggctataaaagcggcctctcggctgagggccggggagctagcgctcaagcagagcccagcgcggtgctatcggacagagcctggcgagcgcaagcggcgcggggagccagcggggctgagcgcggccagggtctgaacccagatttcccagactagctaccactccgcttgcccacgccccgggagctcgcggcgcctggcggtcagcgaccagacgtccggggccgctgcgctcctggcccgcgaggcgtgacactgtctcggctacagacccagaggtaagagggcctggctgggggcgtcagggatgagctgacggcccatgccacggaagagaggtaagaagtgggggcccgcgcctccacccggcacagggtaaacgttacccgcctcagtttctgtttgtctgtccaccctgtgctgtgcagtctacctctatctgtctgtttgtccatgcgtctgttgatgggcacacgctcttggcactgtcctctgtgggatttctctgagatcttgtgatgctttacaagctgcaggtgccggggggcgctggagtccccagagggcatccagagggggcagactcctgctttccgtagattttcccccttctgaatggcaccgggggcttgcgcccgggagagtgtctcgccgaggagggagtaccacaagggtcaggtctcggtgtcctgccgactgggagccagctcacgccgagctctagcgggcgtgcgcctagcaacaggtctgcgccctgctgctcctgcctcagcacgctcttcctcccagtttccctcgcctcccagtgcctccgggacagcgctaggcacccagcgacgcgctggcgcggggccgagctgaggcaattgcaatgttagatgaacccggggggctctgctgatgtttagactgagactccaaacgtggcatcgctggaagaaggtctggtggtccctggcaaaggacgtcggctccaagaaaggtcgcgttaggttgtgaggaaaggcagagagtcctggcagaacgctggccagg

SEQ ID NO: 143 - DNA, 6000 bp, Homo sapiens
cagaagaatgcagggtcatttgcttcaggtttgagtcatttcttccagtccatacagaggtcacagaaataggggtttagatgtttctctgctcttctcagtgagtctgggagcctttgttcttgaatcctgagcagtttcatgtgctgtcatcctctttggaccagctactcagcctgggtgagttgatcatgtggttggtggaaaaccttcttttgtttttggattctctctttgtttcctccttcacagatttcctttgaccccactggtgctattgcctcctgctctaggtgctgaatatttctcatttacacctctaatacaactgtgtcagccttttagtgctatgaagtttcattgattattggggtttggaggaggcagatgggtgttttgaggaagggctttgtgggagggcactgagaaatgagactctcatgattagttctcctggtggagcatctgtgaccacccattatcccattgttaccttagtttagtgggtaacagttatccaggtaagatgatgagggagggaaagaaaaaagaaaaaagcaactcttctcactacaaatagttcctagcttattcaactatgtatcctgtggattaatggacaaattccttagtaagctattcaagaccttttggagcctagcctttttatttttctcttttcctgaatatatactagactttgagtaacactggatctcctgaagcccactcagggaaacccttcaaagtgcatgaaagagacagagaagtgcagataaagatgatgaagaaggcataatggtgactctgtgcttgttttcaggtcaagatgtcagcattctgataaggtggccatctgagagacagaaagctatgtatccataaagatttttctttatctacttgggacaaacttaaagtttctatgaccttaataagctctttgataaattttcatgttctatgtctcccatagaatgcctacagcatgagaaacatttttttggtatgtttaatgtaatctatatgtcatcattcatgacagtgcctatcagagtaagtaaatccaggtgttagaaaaaaaccccaaatattagtggtttaacacaataaaatatatttttcactcacatcaccatccaatcaaagttagtgggcagtggagagagctttgttctatgaagccaatcaaggacccagacatttctcccatcttgtcgtattgtgagctttagcaatggttagcatggtttagtccaaggttgtcatggaatggaaagagggagacagtggggtgaaggctcacctgttcttagttgcctagatgcagaagtgaaactctatttctgctcaaattccattggtcagaactggccacatgaccttacctagatgcaaggggagtggctaggcaaagcagtttagcttcatgcccagggagaggaattgaggtttggtgagcatccatgacacttttgaaatgtcacttcctctctgaagcaagtgcctagtactgcacctgttacatggcaggcactcagaaatattttttgaacaaatacatgaaatgaatgaatatgtataggcttctgctgttatgttctaaggcagaaaatgggaaggaaataattttgagagaagcaaaaatctgtctggtacccccaatgtattcatgaccatttatttgtaaaattatttcacaagcactctaggaatttatactctttgaaagctgttttcatttattcaacaaactgttgagtgccttctatatcaagtgctatgctgtgtgctcaggaaatagaggtggaagtcatcattcctgcccattggtaactcacttggaatgcatctagagggaagtgggaaaagaagccagtaatcacagctatgatgtaggcaccatgatagagatacagatggattgtggtggttatgctgggaaatggcacctaattgagtcaggaatgggtgttgtggggtttcattgtctagaagaggtggtatcttggttggatgaacatgagtttgctagttgatacctgtaagagaagggtagagggaatggtgtgtgcaaattcgacagtttatggaactgcaattccttcagtaggtcaaaaaggtgtgatggaaatactgggagataaggctggagaggtaggcttgggctgagtcacaaagcacttctaaactgcattaaataaagaatgaataggggtttagagtaggaattatgcgatttgtctctatcaaatgaaagaattgatacacacagtaatatctaagcagccacgttatccatattgaccagtctatttttctccttagatcggcctcaaataatataaaattgctaaattaaaaaataaacaaaaacccgttcatagtattttgaggacgatccttttgtgggaagagattagaaataagagcacaaagaaaggtgtacaatatcctccattcaagtagccttgcctcagatagaacaggaaggaggcccatttcaaggaaaacaaaggaattggcttcatgattttacaagaactgtatctgtcaatagagaggattcttctaggaaaatgttttaagatggactagggaagaaaactaggaacaattaggggagctcctgctcttggtacttctgcatcagtgaagagtttgttaaagttgttcatttaaggaaccaagcatcagctcacttcaattagtagttattgagcattcattcctccttcattcattcagcacatttcaatgacacttttgtgccctgcactaagtcaggtgctgcaaggaagtaaaagttatggtcttgcccttgagaagattcaactaacacatgaatctagtgatttctaaccaaggatgtgctctccttaggtatcaagggaagctgggcactgtggctcatgcctgtaattccagcactttgggaggctgaggcatgaggattgcttgaagccaggagtttcagaccagcctggacagcaaagcatgaccctgtctctataaaaaaatttaaaaatttagccaggcgtggtggtatgtgcctgtagtcccagcacacttgggaggctgaggtgggaggatggctggagcccaggagtttgagacagcagtgagctatgattgtgccactgcaatccagtctgggcaacagtgagagcctgcccaaaaaaaaaaaaaaaaaggaacaaatgagagagagacagaatgaatattagtctaaaacgccttggagttcaaagttcagattcaaatcttgactgtatgtttgggcaaccactaactggttgtctgacctttaaatattttcaactgcaaaatgaagataataacagctacattgcaatttccaggattaaatgagatgactcatgaaagttttgtgtgaacagtgcacaactttgcaaacatttgtgatacattattaaatgtgaacgtactaggagttgaaagcagtggttttcaaagtgtttgttgaaacactaatgcccaagattggaaacaggcctttctcaagaaaagagttctatggtcaaacacatttgggagatgcaggatcaaagaaagtaaaacatggttcttatgcctgtaaaatgctagtatgcattgtgaatctcaaggaaaacaaatattttgtgtctctctcccccacattaatgtgatctggtgatctacccctactcccactgcagcatctctaggaccttgagatggacagaactcactctgggaaagactgctctccagaaggaaaagtatgaacctttctttcaattttacagtcccaccacccaggctggcaccgtggctcaatgcttgtaatcccagcactttgggaggtggagcactttgggaggcagaggtgggaggatcacgtgagtccaggagttcaagactagcctgggccatataataagacttcatctctacaaaaaattaaaaaattagcctggcatgctggctcgcgcctgtattcccagctacttggcggaggggctgaggtgggaggatcacttcagccccgaaggtcgaggctgcactgagccacgggcgcaccgctacactccagcctgggcgacagaacctctgtcaaaacaaaacaaacaaaaaatgctaagccattcttcatcagacagtctaggaaactcatttccaagcagtgttgagatttccaccaaggaagcccagagaaaagggccaggccccccgctttaccagggttagaggggatccctcatagaatcgggggtgtgaggtgctgtggtggatacatttaatattctttccaagacacccattgatggcaaggcagtagcagatagcaacaaaagcagagagcagggctgatcctcaaagactttatagactttttataaaaactctaaaagtcaagtaacaacatgactactccgcttctaagtaaagtgtgcataaacatcgccagaaagactgcccctgcctccccaagtcagagaagtttcctcaggccaatagcttcccctctcttccccctcctaccgcttgtctcccttcttctcccaaaacacaccccacacctggcggcattttacaccttcccaggaaggggctgccaagcgcggagtcgcggaggacgcaggcgcagcgcggctcaggtacgcgggaggccccgcccctccgcgcccagcccttctgcgccactccactccccgccctgccccgccctgcctcgcccctccccgccttgcctcgcccctccccgccttgcctcgcctcgccccttagcgcccgtcccgaggggcggggcggccctggtgggtggtgtgggagtgggtacggggagggaagtggaggggagggggtaagtgatagggtaggggaggccctgggaaaggcaggacctcgaggcgcggccgcgcgaggtgaccggagtcacagttcccgcaggcggcgacagcagagcgcccactgcctccagcaggtaaccggccgcggccgcgcggcgccggcccagcgcgggcgtgggacgtggagacccggaggagggcggcgggacccgggcggggaaaggcgcggcgtggcttggctcaggtgcgcttctcccacctggcagctcgctcagggctgtggggggtgcctgtgagggcggccccgccttgcgggctggaggtgagtgtcagttctgtctcttttgtctttaactttctttaaaatggggccgtggtggggcccaggggctgttcccacgtctcctcagcgacgcctgtgtcgcgggggcctgagagagctttaggccccgcgacagctggaagcgcggtggtctggagggcaccaggggtgggcgacggggcgaggctaggtccccgctggccaggtgggcggctctgcctagggggacccgtgaccggggacggtggagaccccagcccaggcggggacggccgcgcgccgggcgcccggctccctgctccgtgctcgggcttccgacggcgcgtccaggtggtttctgggctctggggaaagagaagcgaatttcctttccctggcggggtctgatgagaagagcttcgcagagggtttttacctgtgatgtttctgaaactttgtgaagtggcgaaagggtgttaaaagtgtccctttactgtggtgtttgcaaaccacaatctacccagctaggttttagatttgacttctatttcttccaggttttcctttgctatggttttctttagaggaagatactgtggatgaactgtgggctatagtgcacaccgatagacatctgggtatagacaagatagatgccaagccaaaaccattgatttctttagaacatttaaaatacagcatataaaaggattgcttttgtaattgaaatattattctagttctccctttaggtaggcagttaatagaaatttgttttccctgattaatattgtagaacatagcctggaaaatattgagaattagcaacaacaacaaaatccatttaccagtttcatattttga

SEQ ID NO: 144 - DNA, 6000 bp, Homo sapiens
tcttttagaaaacattgtctaaattccaaaggccataaaggaaaagtctgaaaagtttaactgtataaaaatctaattttctacatgggaaatcaaacaagagactgggaggaacttccaaaccatcaaacatgaaaacaactactatttatttgatagacaaagagtccttaaaatctgagaggaaatatgtaaaatcccaatatgaaaagggaaggaattgtttcattaaaaaagaaattcaaataaataatcagtagatgaaaagatgctctacttctttattgaccagagaaatgcaaattaaagtaatgacatatgaattttcagttatcggtgactggcagtatctagtgttggagcagatgtgtagaaattggctctcccatcctactgtggggggttttaagtgtttcaaccttttgaggaagcagttttatatacctattaacattgtaaatccacatatccagtgacctaaccgtcccactcccacaaaactgacttacagagataggtgcatgtctgaacaaagatacatctacagggcaccattgtggcaccttttgtaacataaatagttggggaaaccatttgaattgttcatcaactcaaaatagacaaattgtgaaatacaaaatgtagtatgtgtgtgtatgtttatataaattgtttttgaagtttggaagaatacacagaatacttacaaccatagtatggtacacactattgattagtaatcaatcccattcctaattcccttaatattttgacacattcacttaaaaggtctttccactttccagcccctcttgcacagaggagtggtgacattctaaccaagaatttaaaaaatctcagattttctggaagtttcttggaaagctctcattttcctgataaataggatagacaagagaagcacttctagaatggcaggataagaagctctgaaaatctgttcctccagaactgcaatgtgaacaccagctaaagtgttgaaaaatgaatggagcctcagagacctttgggacatcatcaagggtatctaacaggtacaatgggaatcacagaaagagagaaaataaggggacaaaaatactatttgaagaaataatgggtgtaaattccccaaatttgatgaaaaagatccatctacatatccaaaagcttaataaatgaatattcatttattgtcatttattcatttattctcaaaatagaataaatgaaaggagagccatacctgcacacactgtagtcaaacaatcaaagggaaactgggagtcctggaagcagcaagagtgagatgagtcgtcaggtaaatcagccctcgataaaatagcaggaacctgttcacccaaaactgaaatgagtcgtcaggtaaatcagcccttgataaaacagcaggaacctgttcacccaaaaccaaaatgagttgtcaggtaaatcagaccttgataaaatagcagcgcctgttcacccgaaaccgaaatgagtcatcaggtaaatcagccctggataaaatagcaggaacctgttccgccgaaaccaaatgagtcgtcaggtaaatcagcccttgataaaataacagcacttgttgaccagaagccatgggaccagcaggcagtgagatgacacagtcagggcactgaagaaaaacactgctaaccaagaattctatatccagaaaacattcttccaaaaagagagaagtattacagctctttagaatttgtctagcaggttttctggtaccctcccccattaatttattaattaaaatttaaaatatgtcagccttttggctaagatcaaatgtcaaaaagaaagagaaattaagacattcttggataaacaacaccgagagaattcacaagcctgtcataagaaatactaaaggaagtctcttgggtcaaagtcaaagaacactagtaactcaaatgcacattatacacagaattaaagtaagtgccaaaaagtattttagtaggtacaaaattaaaactgcaaataataaaaagagaattagcagaatctttccttctcaatggggtttaaaatatggaagctgcctttgtagggtgaatttgggactcgcagtttccacttcacccacttttgtgttgtttgcattcgttaaaaggagatattttacttccccaattaaaattatctttctaatctttataaacaattatttaattccagtaaatcttctctatattgctttactagtgagttctattaaaattttgaagcacagaaaattcccctacagtataaagtatccccagtcacagagaagacaggggttttgcaatgatttctagaatagtgcaatttttatgcaagaacctaatataacacaaaaattatagcccgattttatttgtgggtatagatgcaaaattactaaaaatactattaacaagttgaatccttagggtgttaaaagagtatcactccatgaacgagttggttgtgatgtggaactatgaggtacttttatgatacaatataaaaatttatggtaattttatggtacattgtgagacagtgttttcttctagcatcatactagcaggtctatggagaaaaatcacaggattgtctcaatcaaaaaaagatttcattaacccaactctcatccctgataaacactgttagttatctagagaaagaagaaaattgtcccaatacagtcacctctttgccacacccagccaacagcagacgtgatggaagcctgaagaacaccctgccacgggcacaggcagaggcacaggcaccctgtcgtcctgattatttcaccttgtcacgggcagaggcacaggcaccctgtcgtcctgattatttcaccttgtcacggacagaggcacaggcaccctgtcgtcctgattatttcaccttgtcacaggcacaggcaccctgtcgtcctgattatttcaccttgtcacaggcacaggcactctgtcgtcctgattatttcaccttgtcacgggcagaggcacaggcactctgtcatcctgattatttcaccttgtcctagagtgtcctgccaatgggacagatgcaaaacaaataaaagccccggcttctgaaaagaagcacacagaaatgtcattattttcaaacgaggtgttcccgtatataaaatttgatgttggttgggcatctaacagtattatggccagaggactcagaccacagctgcatccctgtgaggcacagactctccagggcacgcgggtcccgcctgggatgtgcacactcaggtgagctgcacagacaaggtgtcctcagcccaggggagccagaggcctgctctgcctctccaccctgatgcttcctgttctcaccccaccaaagccaaggcttcaatttcagtctgtggggagctgactctgctgctctcaagcactagaagaaggaaccagtaatcgaggaaacttgtggaccccaatgggtgtctgtcccggccaggcctggctgggcccacacaggacaacagggttcaggggtctggacagctgtttctgcccagggaattgtccctgccacctcacactggccactggaaaggaaagagaggaggaggcggcaggctaacccacccgtgagccagtcgagtctacattgtcagttctcacctcgaggggtgccaaaaaccagagggaagcaaaggcccctgaagcctctgccagaggccaacgccccttcttggttcaggagaggtgcagtgttaggtgcagcacaaccaatgacttgcttatgtggctaataaattgtcaagagaaaaactgggttagaatgcaatatatagtatgtagtctcatttttgtataaatacaagtatagaatggcataactcaaaatccacaagtgatttggctggattgtaaatgacttttattttcttcatttctcatcatattttctattatacataaagattcattgttaatataaaagtacaaaattgcaacctatgaattaagaacttctatatattgccagttagaagacagaatgaaaaacattctcttcattctaaccacacacacaaaaaagctccacaaaatacctatggactaccttcatagaaggtggaagagggtctgtatgaagaaaataattaatacatgaaagaagaagctagtcaatgtggagctctattgtgtcccgggatcaacaaagacaagatatctttaaaatcgtcttctaaatttaccctaatgtaaaacaaatccaataaaactctaatgtaattttttaagaatttaaatttggaataattccaaagaacaatttttcttaattttctacagccagaatatatacctttaaaaaaaatgaaaacagagattaactttctcagaattggttgactcactctttccttttatttttcttccatggaattttccagttaacttgagaaagtggaatcgaattccgatgttgaattttccttctggccccattcatgtggcaggtggtgattcaggtactactgggggctgctcagacaaacctcctcatcagacatcaagaggctgttgcaccaggagggccggtaccgtgtctagaggtggtcggcatggggttggagttgtattacataaaccctactccaaacaaatgcatggggatgtggctggagttccccgttgtctaaccagtgccaaagggcaggacggtacctcaccccacgttcttaactatgggttggcaacatgttcctggatgtgtttgctggcacagtgacaggtgctagcaaccagggtgttgacacagtccaactccatcctcaccaggtcactggctggaacccctgggggccaccattgcgggaatcagcctttgaaacgatggccaacagcagctaataataaaccagtaatttgggatagacgagtagcaagagggcattggttggtgggtcaccctccttctcagaacacattataaaaaccttccgtttccacaggattgtctcccgggctggcagcagggccccagcggcaccatgtctgccctcggagtcaccgtggccctgctggtgtgggcggccttcctcctgctggtgtccatgtggaggcaggtgcacagcagctggaatctgcccccaggccctttcccgcttcccatcatcgggaacctcttccagttggaattgaagaatattcccaagtccttcacccgggtaagagaaatagtgttgattttagggagaataactcagcaattggatctggtatgtgtgtattcaactcatttgcagacaaattgtggttgttcaataccagcctgttgtgaattacctgaattgatagcatcctggagcgacactcaaaatgtgtcgcctgtggtgcagctggagcccggagcctgcgtgccaggccccggaggcccccgccggtgccttgtcctggggctgatgatggggaggccggcgaggccgggctgctgcgacgccaggataaccgggctggcggccagatgcgcactcgctgggcgtccgcctgtgtttgccaaagcacgagttgaaacgtgaagtgttgggccagcccgtgtggcaccaatacctgccgcctacgactgttgtgaacactgaatgggccaacaaacctaaacgttaaatgaactgataacgccgtcagcacggagcaggcgctgggtgtttgcgctcttgcgcgtgcgctctgtggggcgcaggctgacggcgggcgggggtcgcctgctccagctcgggctcccgcgccagaaccgggtccagaaccttgattccggaagcgggcaacggggtggttggtgggcgcgcctgagggaagggacgtgaggagccggagtccgcggagttgccgcggagttgtccgcggagtccaggcgggtggggagcagagcagctggaaccccccgagcgccctgcagacgcagcagcctcttgaggggagggtctcccccacctcgggctggacaaagacagcttttccc

SEQ ID NO: 145 - DNA, 6000 bp, Homo sapiens
aaatctgaaactacagtgctgagttctttgtcttcctgttgcctcagtgacagactgctttttgcaaaggtggcagttttgtgtgattcctcatttagttacgtgtttccttggtgtagattctagtgcacaccatcaacaacttatgttaaccagcagtgtataagaaatgagctccagtaactctctactatttctaggaactgaggacacaatttaaggtgctaacagtttttacagcatttgtgagaagagccccacccacccccaacttaagagtgttgtcaaacaatatatttaatggagagcataatgcccaacttattttattttattgagacggagtctccctctgtgtccaggctggagtgcagtggcgcgatctccgctcactgcaacctccacctcccaggtttaggtgattctcgtgcctcagcctcccaggtagccgggactacaggcgtatgccaccatgcccggctaatttatttttttatttttttgagatggagtcttgctctgtcaccaggctggagtgcagtggtgcgatctcggcttactgcagtctctgcctcccgggttcaagcgattcttctgcctcagcctccctagtagtagggactacaggctcgtgccaccatgcccagcttttttttttttttttttgagacggagtctccctctgtcacccaggctggagtgcagtggacgctcttggctcactgccagctccgcctcccgggttcacgccattctcccgcctcagcctcctgagtagctgggactacaggcacctgccaccacgcccggctaatttttttgtattctttttttttttagtagagacagggtttcaccgtgttagccaggatggtctcgatcttctgacctcatgatccacctaccttggcctcccaaaatgctgggattacaggcgtgagccactgcgcccggccaatttttccatttttagtagagacggggtttcaccatgttggccaggctggtcctgaactcctgagtagctgggattacgtctctactaaaaatacgaaaagttagccaggtgtggtggcacgcacctgtagtcccagctactcaggaggctgaggcagaataattgcttgaacccgggaggtggaggttgcagtgagctgagatcacgccactgcactgcagcctgggcgacagagcgagactctggaaaaaaaaaagtttgtgtcttggccaggtgcagtttctcacccctgtaaccccagcactttggggagttgaggtgggcagatcccttcaggtcaggagtttgagaccagcctggccaaaatggagaaaccccatctctactgaaagtagaaaaattagtcagttatggtggtacgtgtctgtagtctcagctactcgggaggctgaggcaggagaatcgcttgaacctgggtggtggaggttacagtgagctgagatcaccgcactctaccgtggcgacagagcaagaatttgtcttaaaaaaaaaaaaaagaaaataaagaaaaaaaagaagtatgctttttcttgaggacctcgtccagcttagaatagcttgataatgccaaatgaacatcattacagaaagtctggaaaagaaataaagctccctacagcagttccaccagtacaacaaataccaaatagcggtcttaactcgatttcatttctttctttttttttttttttgaacagaatatcactctgttgaccaggctggagtgcagtggcatgatctcggctcactgcaacctctgcctcctgggttcaagtgattctcctgcctcagcctcctgagtagctgggatacaggcgcacaccaccacgcccggctaatttttgtagttttagcagagacagggtttcaccatgttggccgggctggtctcatactcctgatcttaggtgatccgcctgcctctgcctcttaaagtgctggcattttacaggcgtgagctgccacgcctggcctcaatttcatttctttatccattcgacacacatttacagatcagtcagtatgggtaggttaccgtgtcaggtgctgggaaacagtggcgagaaagttaacaggtgccttgctctcatggagcttatagcctggtaggaaaagtcacggccacaggccacgtggaagttctcatttgctttcccttcatctttactgttcctgtaaaattgccttctttctttttttctaatggttatttttatagatttaggggtacaagtgcagttttgttacatggatatattgcgtagtggtgaggtctgggcttttagcttaaccatcaccagaatagggtacaccatgcccattagttaatttctcatcccttcccctaccccactccaatgtcattattccacactctctgtccacatatacacattatttagctcccacttcttctcctttttttttttttgagatggagtcttgctctgtcgccaggctggagtgcaatggtgcaatcttcgctcactgcaacctcctaggttacagtgattctcctgcctcagcctcctgagtagctgggattacaggcatgtgccaccatgcctggctaatttttatttttaatagagtttcaccatgttggccaggctggtcttgaactcctgacctcaggtgatccactggcctaggcctcccaaagtgctgggattacaggcgtgagccaccatgcctagccttagctctcacttctaagtgagaacatgtggtatttgactttctgtttctgagttatttcacctaagataatggccttcagttccaactgcgttgctgcaaaagacatgatttcattcttttttatggccgggtagtagagaatcagcacttcttcagctgtggggataatagctgagaatgagaattgttttcatgagctctggcggctgttcctgaggccaggcagcaagggcaacatagcagagaaccaaataggaaaagaggagaaggaaacacagtgggaggaagggaaggagaaagaaaggacaagaagatgctgactgtaggcatgagaaagcgacagttgggatcttagttgacttatgccctggttcccactgtttgtattatctaacctttggcacaagtaaaatacatgatagtttttcaaatgtttcttattgaaggggatgctgtttgccttgaactttggtaatgtgcctcaagtataagagaggttccttagtaattcttctcacccatccgtgttggaaattgggtttgtggatttattctacatctaaccggcaagtaaatcccctctttgctcttctcagtttggaaaaccttaagctaaccgtctttgaaagatggaaactagcatggaggtcccaggaatggggatgccagggtgtcgtctgacctctttagggtcagagtaggggctgagggagagcagctgggctgcctccacttcagccagagtcagaactaggcacaaggtgctggatgaagtttcctattcagggagcagattttttttttccttttacagtgaaattggaacagtcctgggaaaatgggacaggtgtccccagtcaagagacagagctgtttacccaactacgaggagaggccctgagggaggcgaagtgttgataccaagaaatctaaaattttccgatcaagaggtcgcccctgcaggttggggaccagggaactggagcacgtgggctgccctctgacaggtggacaccaggagtggggcgggcaggccaaagtacagctgggagatgggagtccggagggaattctctgggttagttttggcagtccataggaaagcaggtgcctgccccgcaacccggacaccctactaagccagccgcgggtgggctcctccttcgaggggactgcggggcagacgatcacttctttccactgagtctctgggaggagacagggagatgccagaaggggccaagcgtgagccagggcaaccaggccggccaggcccgccggccgctccagcccagcaccagggcgcccgcgcggctgccaaacacccccgggagttttgctcgcaaagggaccacgaggcagctgctggcgcgtcctgcgcgtacccgcccagaggctccccggcttgctcctcgcgggtctgtcccgaaactgacgtgaaaccgatttggtgcaatgcgaatgagctcccgcccgcctccgcctccatcccagccgccgccgccgcccgtcgccataacaaccggcccccaccccccccaccccacgccttgcccctcgggtcccccgggccacaggccacagcgcgggaaggcgccccgccctcggcgccccgcatccggccgccgcgcacccccgcccgcccggcgcttccgagccacgcagaggcgccccctcccgccggagacgggaaagccccggcgcccccagactgggctccgtttccagctcccggaggggctggggctctcccgcgtgcgccccgcacctgccgggggcccgtacccgccctcgccggggctccagggggcacgacggccgtggcccggcgctcttgggaggggagcgggacatccccgaaggcggcgcgctggaggcggggagcggccggggcgcacggagagggcggggagcccgcgggagggggaggagggggaggagggggaggaggcgcgaggtgggggggagcgcggcgggcggcagggagggagcgggagggaggcaagaaagtagcagaaagtgaggctggcaggcggcggcaaaggagccggcgcgcggcggcggcaggaagtctgtgcccgagaacagcagaaataagagccagggagggaccgcggccgcggcggcggcggcgagagcgaaagaggaaactgcagaggaggaagctgcgccgcagcccgagccgcccggcatccccgccgcctctgcgcccgcgccgcgcccccggcgccccctccccagcgcgcccccggccgctcctccgcgccgcgctcgtcggccatggcccgggagaacggcgagagcagctcctcctggaaaaagcaagctgaagacatcaagaagatcttcgagttcaaagagaccctcggaacgtaagtggggaccggggaggcgagggtggaggtggccgcggcaggggctgcacgggcagctccagctgccgccgccgccactaccgcggcagaaacccagcctgtcaccgcgtcctcattgtcccgttctcggcgctgcggagcccccccgagcgcgcccgacgcgtgggcctgcgacccccgggtgggcgccgttcccgggagggggagggggcagcgccgggctgtcagggagcagcccacgcgggcgcgcgacttcccacttctcctgccaccgccgccctctccgctgccttctccccacgcgtgactgtgggctgagcatggtggggatggctgtttaccggctgtgtgcgtttactcgccgtgtgcatgggcgcaccgcgttggcgagacgtggtcacgagaagatcagcctccagtcgttcccatttctgtccttacatcatgtatttctatggaattggcatctgcacgtacgaggtgtaggcaagactttgggtggccacgcgaggatggaagggaagggcttcgcagtgctcagggtcacacgtgggcagagcctcaccggagggtctgtgcatttcacgcgggctcggccgcacgcgccggggagcgcgtctccaagggagggtctgtgcgcgtcgctgcgcgggcggtgctctctccgggctgcatcgagtcccatgctgatggctgtgtctcaagaaagcagaaataatccgaagtcgatggcaggaacgctccaagcatgtgctgctcagctcagctgctgttccctttctgcccaggagttgggtcttgtttgttttgtttcggagcggctcagaataggtggggaggctgatagtgaaagagaatcaggacctgccgaatgagtctgaagttcaagttatttccttccctcac

SEQ ID NO: 146 - DNA, 6000 bp, Homo sapiens
gccacttcttctaacaggtgcatcctggaggtcagatccaatgttggaatttacaactaaccggttatatgaatgatcttgagtaactgtcttgctattctccacttaggttttcttaagaggaaataagaatatctggctggccacgtgtttgtaaagaaaaaccaagacggccaggcgaggtggctcacacctgtaatcccagcactttgggaggccgaggcgggcagatcacaaggtcaggagttcgagaccagcctggtcaacatagtgaaaccccgtctctactaaaaatacaaaaattagccggacatggtggcacccgcctgtagtcccaactactcaggaggctgagggaggagaatcacttgaacctgagaggcggaggttgtggtgagctgagattacaccattgcactccagcctgggcaacagagtgagattctgtctcaaaaaaaaaaaagaaaagaaaaagcaagatatttctacacttatttttatttgtttattttcatagagatagggtctcgctatgttccccaggctggtctcaaactcctggcctcaagcgatcctcctgcctcagcctcccaaagcactgagattacaggtgtgagctcccatgcctagctgcaagacttttcttagctgcctatacttcctggctgtgcaaccgttagcaagttccctaaattctctaattccctaagatcctcactggtcctatctgtaaaatgggctatggctagaacctgctgcataaacccaagggcggtcagtgaattaacccacaggacatttagatcaatgactggccctttaaatagttcatgcactcagatgccgtggctcacgcctataatcccaacactttgggaggcggaggtgggcggatcacttgaggtcaggcgttccagaccagcctagccaacagagcgaaaccacgtctctactaaaaaaatataaaaattagccaggcgtggtggcacatgcctgtagtcccatctacttgggaagctgaggcatgagaattgcttgaacctaggacgcagaggttgcagtaagttgagactgcaccactgcactccagtctgggtgacagagcgaaactccatctcaaaaataaaaaaaaaggccgagcgctgtggctcacgcctgtaatcccagcactttgggaagccgaggcgggcggatcacctgaggtcgggagttcaagaccagcctgaccaacatggagaaaccctgcctctactaaaaatacaaaattagccgggcgtggtggcacatgcctgtaaccccagctactcaggaggctgaggcaggagaattgcttgaacccgggaggcggaggttgcaatgagccaagatagcgccacagcactccagcctgggcaacaagagtgaaactccatctcaaagaaaaaaaagaaaaaacagttcatgaaatattagcatgaaccaatattagcattatggggccaggtaaaatggctcacacctgaaatcccagtattttgggaggctgaggtgggaggatcacttgagctcaggagttcaagaccagcctgggcaacattgccagaccacaatctctaaaaaaattgttttgccaggtgtggtggttcatgattgtaaccccagcactttgggaggctgaggcgggcggatcacctgaggtcaggggttcgagaccagcctggccaatgtggtgaaaccccgtctctactaaaaatacaaaaaaaaaaaacgttagctgggcgaggtggcaggcgcctgtaatcccaactacttgggaggctgaggcaggagaatcgcttgaacctgggaggcacaggttgcagtgagttgagatcatgtcactgcactccagcctaggtgacaagagcaaaactccatctcaaaaaaacaaaaaaacagctagacatgatggtgcacatctgtggtcccagctgctcaggaggctgcagcaggagaatcgtttgaatccaagaggcagaggttacactgagccaagatcgcaccactgtactacagcctgggtgacacaacgagactctgtgtcaaaaataataataataattaaaaataaaactaaaaaaataagtgggatgggccaggtgcggtggctcacgcctgtaatcccagcactttgggaggccgaggcgggcagatcacctgaggtcgggagtttgagaccagcctgaccaacatggaaaaacctcgtctctactaaaaatactggctgggcatggtggtgcatgcctgtaatcccagctactcgggaggctgaggcaggagaattgcttgaaacctgggaggtggaggttgcagtgaaccaagatcgtgccattgcactccagcctgggcaacaagagcaaaactacatctcacaaaaaataaaaaaataagtggcatagatgtgtataggactttgaatttttcttggggactgacattctaggggcagtggcgagtctaaacttactattgagtacaatgtccatgcctgcatgtacttttggggtgagaatcctcaggttctcaaggactccccaactccaagaaccactgtggtagaaacagatgactacaacctgagaactttcacagaagcaaattcttgcctccttgcctcccctctctcccctgcagggattggagtttggaatcctgccttcgatgtcaccccccacgacctcatcactggtggcatcatcacagaactgggggtctttgcccctgaggagctccggacagccctaaccaccaccatctcttccagggatggaaccctagatggaccccagatgtaaccaactcagctctccctagcctgcctctctaggtttttcaatacatttcttgaatggctacccaaaagctgaccgtccagcccctgaccacacttgttcctagtgcagggagctcagacagggccttccatctagagcccagcacctagagccaggctgcccagattcaaatcctgactccgccacttttcccactgtatgatcttgggcaagtcacttcacctctctgtgccttggtttcctcatttataaaatgtggataacaggccgggcgcagtggctcacacctgtaatcccagcactttgggaggccgaggcaggtggatcacaagatcaggagattgagaccatcctggctaacatggtgaaaccccatctctactaaaaatacaaaaaattagccgggtgtggtggtgggcacctgcagtcccagctacttgggaggctgaggcaggagaatggcgtgaaactgggaggcagagcttgcagtgagccgagatagcgccactgcactccagcctgggcaacagagcgagactccgtctcaaaaataaatataattaattaattatttaattaaaaaaataaaaaataaatgtggataatactagtacctccctcttaaggtcagggctggagctagggtgacatctccagggcagaattttaagaggacaccaaaaaagctcagcaaccaagataaaaaatattttaaagcaatattttgttttgggttttttttttttgagatcaagtatcactcgttacccaggctggaatgtagaggcgagatctcagctcactgaaacctgtgcctccccggttcaagcgattctcctgccacagcctcctgagtagctgggattacaggcatgcgccaccatgcccagctaatttttctatttttagtagagacatgatttcaccatgttggccaggctggtctcgaactcctgactcaaatgatccccctgcctcagcctcccaaagtgctgggactacaggcatgagccactgtgcctgaccttacagcagtattttttaaaaatcaaaattaatgcaaaaatccatgatgaggccaggcttggtggctcatgcctgtaattccagcactttgggaggatcccttgagcccaggtgtttgagaccagtttgggtaacataggaagagcttgtctctacaaacaaaaatttaaaaacaatgagctgggcatggaactcacacctctagccccagctactcaggctgaagtgggaggatggcttgagcccaggagttcaaggatgcagtgtgctttgattgcactactgcacttcaccctaagcaacagagtgagaccccatctctttaaaaaaaaaaaaaaatccatgatgaacaaaacaagtatttgtttgagacggggtctcgctctgtcgcccaggctggagtacagtggtgccatctcagctcactgcaacctccgccttctgggttcaagcgactctcctgcctcagcctcccgagtagctgggattacaggagcctggcactatgcctggctaatttttgtatttttattggagacaccatgttagtcgtggctggtctccaactcctgacctcgggtgatccgcgccccgcggcctccgaaagtgctgggattacaagcgtgagccaccgtgcccggcctaaataaaattttgaagaggctagaaccccgcacttgtgccttgagcttactgacctcaacaccctggttccactaaaactttatttacaaaattatgctgccggtctgcaggatgtagtttaacaatttgattattttggatattaaaatattttttaagtcttgaaaatattgtttactattaccaaagtttttgaaccttcttaaattctgtaccagaggtgagtgccacaccctaacctagtctgagtttttatgtgtaaagatcataaaacgttgtaagttttctaaaacacataagctctcaataaacgttagcttatcattgtcaccgttttgttcgtaatgtttgaaaactccaactgtgatccactacactacccttgtgggatgctgtctctttaactctgtgccacgttgtatcccgtgagttcttgcgtttttccgccccgctgtatcccatggttccctgtgccttccggctacgactgctcacagtcccgcctcttccgctgcgtgccggaccatggcgcaggggcagcgcaagtttcaggcgcacaaacccgcaaagagtaagacggcagcggcagcctctgaaaagaatcggggcccaagaaaaggcggtaaggagcggcccggggacttgggggcgaggtggacccccggcttcccggcctcacgtgagcacatctttccccaggtcgtgttatcgctcccaagaaggcgcgcgtcgtgcagcagcaaaagctcaagaaggtgtgcgggggcgagagatggagcccggagggcggcgagtagcgaggggtggaacccggaggacggcgaggggggatgggtggagcccggggatcagtgaggggagagggtggatcctggggacgagctaggagcgaggggatagagccaggggccgcgttaggagcgaaggatggagcccggggcgcagagaggggtaagaggtggaagctggcgagggataggggctgggggacgtgctagggacgagagatgaaatctggaggccggcgagggaaggagcacagggatcggcaaagggcaagggatgaggcctggaggactcccagctctgtgggcctcccttttcttccttgtgcaaggggtgcaggaacaccacttaccacttcaaaagggcctcgtagaagcaagacctgcggcccaaaaagggttccaataacgtcagcctcttgctgttactgttttctttaattgaactcaggaagacagcgaggtgacatgggaagggaattgaaagcccagctttgtaaacctagaacagcagagggctcaaagaagtgtgagggtgcgttggttatcgtcatttttttttgagtcagggtctcactgttgcccaggctggagtgcagtggccccattatagctcactgcagcctcagcctcctggacttaggcaatctttccgtctcagcctctcgagtaggtagaattgcaggtgctcgccaatacgcggctaattttattttttttgtatttttggt

SEQ ID NO: 147 - DNA, 6000 bp, Homo sapiens
ttagatattcaagccattcctaaaaaacccacatataaacaatttatttacaatttatgggaggctggggagggaggattgcttttgcccagaagttgaaagttgcagtgagctgtgatcacgccactgcattccagcctgggcgacagagcaagactctgtctctaaataaataaattaaattaaaaacaaaaataacaatttgcaagcctgccaggagctgtcccaaagcagtctctgtaatcatttatggtcaggagtgtggtaagcaagaatggatttttttccaggagagtcccaggatatttagtatccaatctccctcctcgattctccttctggccttgtagccagatgggaacccactggacaaaccccaaacctcttcacactggaatccgacactgagaagagcagcttgggggaaaatctccctagagatactgaaccagtgttcagaatgaaattttttgcctgccctctgccttcccatacccatggctctccagagtcctctcagagctctcccgaaatcccattcacttatgtctcaggaatattgggaaaaatggggctttccaagatatctttcttgtaaacctgatcccatatagatttgccagaaccaaaactaatttggaaagtccttaatatttgcctatttgataaaataaaaataaaaatgggcataaacgttttttgtcattgaatttttaaaaacgattttaaacttttttttttttttttttttgagatggagtcttgctctgtcacccaggctggagtgcagtggcgcgatctcggctcactgcaacctctgcctcccgggttctcgccattctcctgcctcagccccagagtagctgggactacaggcgcctgccaccacgcctagctacttttttatatttttagtagagacggggtttcaccgtgttagccaggatggtctcgatctcctgacgccgtgatccacctgcctcggcctcccaaagtgctgggattacaggtgtgagccactgcgtccagccaattttaaacatttttaaggctgggtgtggtggcttatgcctataatcccaggactttgggaggccgaggtgggtggatcatttgaggtcaggagtttgagaacagcctgaccaacatggtgaatccccgtctctactaaaagtacaaaattagctaggcgtggtggcatgtgcctggaatcccagctacttgggaggctgaggcaggagaatcgcttgaactcgggaggcagaggttgcagtgagccgagataatgccattggactccagcttgggcaacaagagtgagactctgtctcaaaaacaaacaaacaaacaaacatttttaagtgtacagttcagtgttaggtccattcacattgttgtgcaatcaccaccactatccatccacagaacttttttcatcttgcaaaactgaaagtcgatacccactaaacactaagtctcagccaggcatagtggctcacaactgcaatcccagaactttgggaggctgaagcgggaggatcccttgaggccaatagttcaagactagcctgggcaacacagcaagaccctgtctctacattttttttaaaaaattagctggacatggtggcatgtgcttgtagtcccagctacttgggaggttgaggtggagggatcgcttgagcttgggaggtcaaggctgcagtgagccatgattgcaccactgaactccaccctgggtgacacagtgagatcctcctgtctcaaagaaagaagaagaagaatgaggaggaaatggaggagagggagaaggagaagaaagcttctttcaagttcttttttagaaaatgctggtatattaaccatgctctcttgaaagaacatttttcttaagtcaaatactttgtcagcaataatcccactgttcctccaaacttaacactggttcaagattctgttttaattcttgtgacaaatactgttggatgaggagataatttttcattatgtgatccaatgaactcaccattgagtaagaagtattgttttaaccaaaaatatgtatttgaaatttaaaaatgagccaatgaaaagaattgatgaaagtcaagcaatctaatgtggaatatagagtaagatggattgtcctgaaatataattttcaaaaagttgaaaacatgacttatgcaactataagatgaaaacatatctaagattctattcaattgattaatggaggactcagtaagttgttgatctcaaaggagaactagcaagatgttaaggttcaaaggaaaatccaacatcaggaatgatcacatgaatttgctaataggtgccaaactggttaactagttagtatcatataggacaaaatgaaattagtgggtttaacttatttattttctggcagaaaggactgatcacttatatttctcttggaaaacattcattttcactgctatggacataaatcttttacattatcatcagttttcggcaagttaacttctagccctctagtgctgcaaaatagcctagtcaataggaagtccagcgacggtgcacccagcaccccactgaaaggatacccagtaatctcttttgcccatttccaagttttggacaaattttcctgacattatcaataaaaaatgtatatacatatatacttaagtttatttattttgcaaggggccacagtggggatgaagtggtataggctggttaaaaatcttaagtgaatggtatatttgttgaaacaatgacatgatttccaagtttgaagtttatggagagctgaacttaaaaaatttgtctaaataatagagacacaccgtccatctattgctccccaaacaggtgcctgtctttgttgatcaaaaataattttcaagaaagcctgctaagaaaagagcttgtgaggccagatgcagtggctcactcctgtaatcccagcactttgggagaccaaggtgggaggattgcttgagccaaggagttggagaccagcctgggcaacatagccagatcttgtctctacaaaaaaaattttttaaatgagccaggcatgatgctgcgcccctgtagtcccagctactgggaggttgaggctagtggactacctgagcccaagaggttgaggctgtggtgagctgtgcactccagcttgggcaacagaacaagaccttgtctccccaagaggaaaaaagagcctaggaagatgagctttttctttgtttgtttttgtttgtttgtttttttaagagagggggtctcactgtattgcccacatgggccttgaattcctggactcaagcaattctcctgcccttcagcctctttagtagctgggactacaggcatgccacacttcacccagcttgaagttgatttttaactacttgttaagactccacaactttagcccttatatgggtgtgtttgaaagtggtgagatttacggcaggctcatggcagagagtaaacaagtgaggatatggggtgaagtagtggggtgcctgctctcggctgcgctcccacagacatcacaagctcaaagccttcaaaccggatcttatttatttccttctccccgactagtcataaaacctagtggattccactcttacacactgccctcttcacactcatttgtcaatgcccagctgcaggacacatctatctctatctctatctgtctgtctgtctgtctgtctgtctatctatctatctatctatctatctatctatctatctatctatctatctatctgtctatggagtctcactctgtcgcccagtccggagtgcagtggtgcgagctcggctcacttcaacctccgcctcctgggttcaagcaattctctcgcctcagctttccgagtagctgggattacaggtgcctgccaccgtgcccacctaattttttttttttcagtagagacggggtttcaccaagttggccaggctggtatcgagctcctgacctcaagtgatccacccgcctcgacctcccaaagtgttgggattacaggcgtgagccaccgcaccgggccaggacatgtcttctattgcctgattcctgcagcaactccgggctggactctttgccttccacatcccaacccaaccccaatcccaattccacagaacagacagagatgtgtcagtgatgaagtcattcactgcttgaaactgtgacagcttcccggcgacctccatcacttgggttaggagggctaacttccctctgcagctcaacgcccctctccaaccctctgctctcactctaggtccccattccccatttctacaacaaactcccgcttagattcctccccaacgtccttctcatccttgggtcttggtttactccttcccttgggatgagtacggctgtgatggaggtaggggctggcatcagcgcgtcccaagccgggtgtcctcagagcagcggggactgatgccagcccctccctccatcacagccctactctctctcactcccggtgaccaggtgtcacctggtcaagtgtgtcgcccctgggtggcctgggtctgcgtcttccgacctctcatctgggccttgcgctgtggtcacctcatccagctccctttcacgtcctggaagatttccgccccttgctcccctcacccctctccccgggggtgcctccctgagccctcgagtggcttgaatcctccgcaacatttcctccccagcactctccggggctctgcgtccagctgtgtcattatccgatgagtgtctgtccccctttgcgaatgtgagcggcgagagggcagcaagtgcggagccagagacggacgcggaacgggcgtgtcctaagcccaggccccgacaagaggaaggacccgcgctctgcggcctcccggggaccccgcagcgccccccgcttccctcggcggcgccggaagccgccggctggtcccctccccgcggcgcctgtagccttatctctgcaccctgagggccccgggaggaggcgcgggcgcgccgggagggaccggcggcggcatgggccgggggccctgggatgcgggcccgtctcgccgcctgctgccgctgttgctgctgctcggcctggcccgcggcgccgcgggagcgccgggccccgacggtgagtgcgggctgggacgggcacgggcggccggcggggcccccggctgggcctcgaggactctgggcgcacggacgcttccccgcccctgggccgggccggcgcggtgccgaggcgtggggcgcaggtggggcccgcgccggccgttggagatcggcaaggaggagctcagagaagcggggggctccccgccgggcttccctgcccccgcccgaccccgcgacgccgggggacgccggttttaaggcggcctggccgggcccccagggacctccactgcccaggaggcggggtgggggctgggcgcgagcgcggacccgggcagggcggcgcccggggaagggcggggaggccagggcgttctgcggcgctgtcacgcttccggctctgcggtggcttttgcatgacacatttttgacccgaagcaattttcttaccacttttaattttttcacgttgttagagagccggatgctaaatatggtgagaaagacgcgtaaggaagagtacaggagtgaagccattaattcactcattcattcaacagatggcccttgaacagcttccctgtgcgcgatgagggcgggcagtgcgggccctcgtggagctcattgtctggaggatttagaccagcaaatgttctatttccaagcaatcgagggagttgtttttcctcctctgcaaaatgcagtgttgagctgagtaggaattacacagaggattcagacacgcaggggaggtgacattcatccacataactgtaatacaaggcagaatggcatgggtgccatgagaaggtgtgggtggtgagggcagggaaaggggaatcggtggtgacccttgagctgggccatca

SEQ ID NO: 148 - DNA, 6000 bp, Homo sapiens
gtggaaccttacaaagtaaacctctctcaagatttagagcatcagccacaaaacatcatttgagagctaaattttgagattatgcccccgcctgaagatccttctatgccagttgcactcaacattggcaaattggctcactttgaaccatctcagtgacaaaaccaagtgggtatagttcctcggtcacctccacaatccagatggaatccttggactactagcgacattgctgagggacctctggcttttgcttctccagagcaaataagcttggacctcaagaatgaattggtgtaccagttggaacaggatcatgatttgccagcaatcttgcaggagcgagagttactgcctgtgaagaaatttgaaagtgagattctggaagcaatcagtcaaaattcagttgtcattattagaggggctgctggatgtggtaaaaccacgcaggttccccagttcattctagatgactttatccagaatgactgacagcagagtgtaacattgtagtaactcagcccagaagaatcagtgtagtttccatggcagagtgagttgcatttgagagaggagaagagtctgtaaaaagctgtggttacagtgttcaatttgagtctgtacttccttgtcctcatgccagtataatgctttgtactgtaggtgtgctcctaagaaaattagaagcaggcatttgaggaatcagtcatgtaattgtagatgaaatacatggaagagacattaatactgacttccttttggtagtactgcgtgaagttgtttcagcttaccctgaagttctcattgttcttatgtccacttctattgataccagcatgttgtgtgaatatttcttcaattgccccatcatttaagtgtatgggaggacttacccagttcaagaatattttctggaagactgcattcagatgacccactttgttccttcaccgaaaaccaagaagaaggacaaggatgatgatggtggtgaggatgatgatgcaaattgcaacttgatctgtggtgatgaatatggtccagaaacaaggatgagcatgtctcaattgaatgaaaaagaaactccttttgaactcgtcgaagctctctttaagtacattgaaacccttaatattcccagagctgtgttggtatttttgcctggctggaatttgatttatactatgcagaagcatttggaaatgaatccacattttggaagccatcagtatcagattctacctctgcattctcagattccttgacaggaacagcgcaaagtgtttgatccagtaccagttggagtaaccaaggttattttgtccacaaatattgctgaaacaagcattatcataaatgatgtttatgtcgttgactcctgcaagcagaaagtgaaactctttgctactcacaacaatatgaccaactatgctacagtatggggatcaaaaacaaaccttgaacagtggaaagggcaacctggccgaatacggcctggattctgctttcacctctgcagccgagctcgttttgagagacttgaaacccacatgacaccagagatgttccaaacaccattgcatgaagttgctcttagcataaaacttccatgtctagttggaattggccagtttctggccaaagcaattgaaactctccctttggatgctgtgattgaagcagaacacactcttagagagcttgatgcattagatgccaatgatgatttgactccattgggacgaatcctggctaacctcctcattgagcctcgttttggcaaaatgatgataatggtgtgtattttctatgtgggagatgctatctgtaccattcctgctgctacctgctttccagagccttttataaatgaaggaaagtggctgggctacaaccattgaaattttgctggaaacggattttctcatcatgtagcccttttatcagtattccaagccggagatgatactagaatgggtggagaagaagcagaaatacgtttttgtgcgcacaaaagacttcatatggctacactaagaatgacttgggaagtcaaagttcagctcaaagagattctgattaattctgggtttccagaagattgtttggtgacacaagtgtttactaacactggaccagataataatttggatgttgttatctctcttcctggcctttggtgtgtaccccaatgtatgctatcataaggaaaagacaaagattctcaccactgaagggtgtaatgcacttatccacaaatcatctgttaattgtccttttagtagccaagacatgaagtacccatctcccttctttgcatttggtgaaaagattcgaactcgagccatctctgctaaaggcatgactttagtcaccccactacagttgcttctctttgcctccaagaaagtccaatctgatgggcagattgtgcttgcagatgactggattaaactgcaaatatctcatgaagctgctgcctgcatcaccgctctccaggcagccactgaggctctggttgttgaagtaaccaaacaacctgctatcatcagccagttggaccccgtaaatgaaagtatactgaacatgatccgtcaaatctctagaccctcagctgctgatatcaaccttatgattggcagtacatggtatggagatggtccaggtcctcctaagatggcccaatatgacaatggaagcggatatagaaggggaggttctagttatggcagtgaaggctatggcagtggctatagcagtggaggctatcgtagcggaggctatggtggcagctccagctcctgtcgggcaggatatggtgcaggtgttggtggaggctatagagaagtttcctgaggtggctatagaggcaactctggaggagattacagagggcctagtagaggctacagatgatctgggggattccagcgaggaggtggtaggggggcctatggaactggctactttggacaaggaagagaaggtggcatctgttaaggcttggttatgtcagttcctgtgtgtagacagtaagaaaaaaaaagccatgctatgtgtgacatttttttccaatgtttatttcccaccaaaaagtaaatgcattttaacccattctgtggttcactgtagcttaaggaaaccaagcatatagatgcattagtgattttgtttatattatgtaaaatgtaacgatctatcttagaaataccacagtttgtatttttctttaaggagtaaagatttgtctttaaaaataacttgatattttcctggctttcatttaatacaatggaaaataaagtattacacgaaaaaaaaattttttcttagagacagtatctcattatgttacccaggctgaagtgcagtggctattcacaggcacgattatagctcactatagcctcaaagtcctgggttcaagcctcctgagtagctagaacttcaggtacatgccaccttgcctggcttcctgctttcttattcactaagaaactttgttctctaaaatcatagattagagacaacttcgtgtttgaaattacatcagtaacaataaaatatcccacctttgcttgaaggacctcagtcattccacacagagaattggcctcaatttacaacccagatgtcaagcttctgataaggggtttccagacacaaaactccatcgctattttaacttcatagtctccaaggaaataggcccttcatccactttgcagtctagacctagagcctgtgtgttgatggcagcagcaggccgtctggagcagccactaccatcattgacatacagccttgttttgctttgagtctaccaaaatactgcttatttaaatttcatctcaactccacacttccccagaatcctatcactctatctggggagatgccatgtggtccaggcagtcttaggctgaatgggcaaggatccaagggaaaccaattagattgaaattagttctgtctgtgggccctcaagatttaaaagccatggacaagggggaagcaaccagtatcgaccagcgataatctatgagcaccttcagcttggggtgtggggtcatagacaaaaagaatggggtttaatcagtgttcccatccaaggcaaaaccagaccagaagaatgggagctaccaggaggctgagttaagaccaatactagggccaggcatggtgactacagcctgtaatcccagcacttttggaggccgaggcaggtggattacttgaggtcaggagttcgagaccagcctggccaacatggtgaaacctcgtctctaccaaaaaaaaaaaaaaaaattacaactggcacacacttgtacccagccactagggaggctgaggcaggagaattgcttgaacccgggaggcggaggttgcagtgagccgaaatcacatcactgcactccaggctgggtgacagaaggagactccgtctccaaaaaaataaaaaataaaaaccaatactaggaagtgctttcttaccatgaaagctccctgcacacagaatgaagagacagatggcagaagcaagaccagaggcctccaccactgaacaaggtcaacctgaatttgtttttgtagctctgggaagtcctgaactgaatgggaggttctactgtggccctctactaacagtagatggaacctggaaccatctactgttaattgtccttttagtagccaagacatgaagtacctatctcccttctttgtatttggtgaaaagatttgaactcgagccatctctgctaaaggcatgactttagtcaccccactgcagttgcttctctttgcctccaagaaagtccaatctgatgggcagattgtgcttgcagatgactggattaaactgcaaatatctcatgaagctgctgcctgcatcaccgctctccaggcagccacggaggctctggttgttgaggccatctactgtggccctcatacatcatactgtgtatggttccaggatttgtaaatgctctaatcaatgtttttttttttttttaaagctgttcctgctgattgctttttaagctaggctcaagtgtggggccacggaatccttcaggtgcccttcaaatcagacattacatttcagctctcagggctagaatgcttccccctcttatcttgggcaggtctttgaagaagccagtttagccttggtaattttgaatttggccatagtatacggaggagagctaggtagctatcaaaacgcttagacaaacgtatggtaaaatgcagcccagcctgaacctccgcaaaacccccaaacctggagcagcaagtgggcaaaggagtgtgtgtttggggcagggtactgagtcccatatgtaatcaagagacctggagggcccaaggaagtcagtgacacccccacaagctacatatcctccaatggattgtggtggtcatctccggctaccgaagccaccttgcttattcccataggcttacaaacattatgatgcttcacacgagttgtgggtgaagtgaaggaattggaaagtcccggtctaaggccctgcaaaactgctgtctggtaaaaacaagtgactatggcaaggccctgaatgtactacgtatagacttaagtcagtatttgtgcctaacagcaaagcatgccacaagaggctcctcaaaagccgggtaattgatgccattgttttcttgacctagttgaagagtcaaagaagagaaggtgatgcagaaacttctttccagtgaagtgacagatccaagcaaggaacacctgcctgtgaggggagcggtaggggagggggtagattcggcagcactcgggtagtggcagggaccacatattgtcggtgttaaccactgttatcactggcccaggtcgagtgaggacgagtcatttccccactaagcacttggggagtggcagggaccacatattgtcagtgttaaccactgttatgactggcccaggtcgggtgacgacgagccatttccgcactattgtccctt

SEQ ID NO: 149 - DNA, 6000 bp, Homo sapiens
ttgggcacacctcccagacggggcggcggggcggaggcgctccccacatctcagacgttgggcggccgggcagagacgctcctcacttcctagatgggatggcggccgggaagaggcgctcctcactttccagactgggcagccaggcagaggggctcctcacatcccagacgatgggcggccaggcagagacgctcctcacttcccagacggggtggcggccgggcagaggctgcaatctcggctctttgggaggccaaggcaggcggctgggaggtggaggttgtagtgagccgagatcacgccactgcactccagcctgggcaccattgagcactgagtgaacgagactccgtctgcaatcccggcacctcgggaggccgaggctggcggatcactcgcggttaggggctggagaccagcccggccaacacagcgaaaccccgtctccaccaaaaaaatacgaaaaccagtcaggcgtggcggcgcgcacctgcaatcgcaggcactcggcaggctgaggcaggagaatcaggcagcagtaccgtccagcttcagctcggcatcagagggagaccgtggggagagggagagggcgagggcgagggcgagggcgagggcgagggagagggagacaatgagactccatcttaaataaataaataaataaataaataaataagacccttgattcttacctcacaccacccataaagttagtttgagtgtatcatagacctaaacaaaaagccaaaactatacaattctagaagaaaatataggagaaaatatttgcaaccttaccttaaggtaggcaatcaaggaaaatgtttaataaattggacgctgtcacaattagaaactttggctctttgaaagataacattaggaaaatgaaaaaacaggtgggtgtggtggctcacacctgtattcccagcattttgggaagctgaggcagtaggatcacttgagcccaggagttcaagaccagcctgggcaacatagcgagatctcatctctactaaagataaaaaattgaaataaaaataattagccaggcatagtggcgtgtgcctatcatcccagctactcagaaggctgaggtgggaggatcacttgagcccaggagttcgagattgcatttagctacaattataccactgcactgcagcctgggagacagcatgagaccctgtctcatggaaaaaaagaaaatgaaaagacaaaccatagaatgctatgggctctcatgcattgctggtggtaatgtcaaatagtatgaccactttgaaaaacaatttcttaccatgctgccaggcgcagtggctcaaacctgtaatcccagcactttgggaggccaaggcggatggatcacaaggttaggagttcaagaccagcctgaccaacatggtgaaaccccatctctcccaaaatacaaaaattagttgggtgtggtggcgcaagcctgtaatcccagctactcaggagactgaggcaggagaatcacttgaacccaggagacggaggttgcagtgagccaagattgcaccactgcactccagcctgggcgacagagcgagactccatcccaaaaaaaaaaaaaaaaaaaaaagtctgggtgtggtggctcacgcctgtaatcgcagcactttgggaggccgaggcggatggatcacgaggtcaggagatcgagaccatcctggctaacacagtgaaaccctgtctctgataaaaatacaaaaaaaatagccgggcttggtagcaggcgcctgtagtcccagctacatgggagtctgaggcaggagaatggcctgaacccgggaggcggagcttgcagtgagctgagatggtgccgctgcgctccagcctaggctacagagcaagactccgtctcaaaaaaattaattaattaattaattaaataaatttttttaaaaaaagactcaccatgcaaccaagccatcccgcctacttccaggcattttatccgagagaaatgaaacatatgtatattcaaaaaactttctaggaaggctcaagtcagttttattcacaatgccttcaaactggaaacaacccagacatccaacaacaaccccgcatcctcctttggggtcctgagagggtgcctccccaccagcccagcttggccaactttagtccatccatcaatgtccaaatggacaaacagcctgtggcatatccatacaatggaatactactcaccagtggtaaggagggaacttgatacacactttagtaaatacctgaaattttaggttgcttcagtatccattttgaatatagggttaacaatttcatactagaagcagggcttagtcaccttggatacagtttccagctctctgctggaaacagtatctcaacacattccgtccagatatctggtcctaggtagccacctcctggtaactgcctccttgtgggatgtatacatacaaccaactagactcaccccactgacgcccacaccctgcatggactatgcagatatgtctcagtgaccacccctaagtcacaaggtggccccacaggactccagttcgctcctctaggtgaaccaattagagctccccttgggaaaactgcttgagtaatgccctgcactccaataaaagcctcagcccacaggtccgtctctctctggctccccccacccccacaacgattgtgtacagtgtccccaagacattcccgacggccctcagtgtgccctcttcccctgtggatctgtaagtaataggaccacttctgttagttcctgtgtttcgttgtgttgcctgctctgtgtcatgcctgactgagacgctcaaacgtaacgttttccctggtcagggctttccctagagagcagctatcttggtaggaataaactagatacaggtcagacaagaagcacaaggagatctgccaggataaatatgtctcctgggagagggacacccggtcacaggtcagccaggatacagaggtgccccatgaaaggcccacggcaaacacccacgcccaaatcccaggagccctgtcagggcagagttggcctttacagtggctctccagggaggtctcaagaccaaggtagaggaaaatacaacacacacacgccacacgggcgacgctcagctgcatggtgccaagcgaagaaagccaggcacaaaagaccacacggtgaatggttctccttgcatgcaattgcgagagaggcaaagggcagtgacagaaatcagaggagcagttgtctggaaccagggcggaggggaggtgaggggttagctgcagaggggcaggagggtacttttgggaggagaggacttcttgaactcggggggagactagcctggtggtttcgcgtgtcagaagtcatggaactgagccgggcatggtggcggggcctgtggtcccagctgctcgggaggctgaggcaggaggatcgctggagcctagaagttcaaggctgcggtgagccgagatcgtgccaccgcactccagcctgggcgacagagaccctgtatctaaaaaataaaggaaaaaattcatggaactgtatacttccatgtactgtacttaaatttcctggtatttatcgtatgtatagaatacctcacatcttaataaagtcgtcgtttttagtgtgaggggtgctatggggcacggagggcgatccggctgccgaccctcggcggcggcgcgggagtgcgaggccggcggggaggtcgggtcctgcggcctcgccggggcccctgcagcgctctcccgccagggggcagcgtcgggccggcggcgcgggcgggaagctccagcggccgggacgcggtggtgccgtcttccccctgcggtgagggaccgcgtcgcgccaccccgctctcagcgcagcccgcagcggcgaggccaccgggtgggacacgggtgcccgcgcgtcgcgccgcagctcgcggggacctggcgccccgtcccgggaggggatctggcccccgggcgccggctctccgtccacgcggcgtcctccctgcagcccgctagggccgctcgcccgtcgccgcctgcggaacgcggaggggcagcacggccacgcccggccactcgaacctgctccccggcgccgcgtgaccgtgtcaggtccccgtcggcctcgccgtgccgaccccgggcgcctccacagtggctcggaggccgctgctgcccggatgcccgggttccacgaggctctcccagcccgacaagcccgccgatcccacgggcacgggcggaggagagggaaccgccgcgcccgccccgcgcgccgtcgccgaccccggtgggtcgcgcttccccgcgcacgccgcgctctggcgcggggagaggcccctcggggtccgcccgggtcagcgtcccgcgggggtggcggccgttcgctcagcctcctctcgacttccctttcctgtcagggctgctggggctgacaggctcccgggcaaccacgccggggaacccctcacgcccgccgatcgctgcggggctcagcagccgccccgtgcgctgagtcccctgtcatgagtgactccattgcgaggcgtttcgggccacgaagcaggaccgggggccgcactccgggtccccgccctgccctcgccgacctcccgcgcgtggaagggggacggcggcggcggagctccccgccacggagaaccccgaaatggtcatttcgaacgagaggagtgtggcctggggtgtctggtttaacagccccccgcgccgaaaggctgttcgccgaggaggggccgccggggagggagcccgagcgcggcggggcgagaccggtccccgcccggcgttgcccggcccgagggacggcggcgcccccaggaccctccccagcgcggccccagctcgctccgggaccgcggggccaggccgggcgggagcgcggggacgtacacggcggccccgcccgcgcgctcctcctccctcccggcccgccctgcgccggcggcggcggccccagtctccgcgctgctgaggcgcgcccggccgctcccacggcctcccctccgccctgcggtcccgccgcctccggggcctcctgggaccctggccctcgccgggcaggacgccgccagcgctgaaggcgcagcccggaggccgcgcgggtgagtcggtgcgcagccccagcggctccagaggagcgggtgcggggagggcgagcggaccaagtcggccgcgttcccaccttgcgcgcagccgggagaccagcaggcccagcctctagggaggagggcaggggagctgggggccgccccccgcattctcgcaggcacctgtccctaggccggggtccgctggctcgaagcactgacccgccccggacctagggggacggaggcagcggtgacatttgcccaggaagggcggcagtgggtaaactccactccagggcacgggtctgggcgcaggttgaggcctggggttgaatctgcttctgctagaggccagtgttctcagggaggcccataacccgactgggtctcagttccccctggtatgaaacagcaacagggcaagaggaggaaaccatgccacgctgcaaagctctgagcacgaagccgagaagaatctcggctcccggcctcgggggctgcacttcgggccaggcctgcactcccaggataagaggatggcctcctgccccaggggtggcatgggggcgcgcaaaaagcaaaggtgaccctgccagggagcacccagcgctccggttggtggtcatggggtctttgcgtgggactcacagtgtggccgggaaagttctgtaatgaggacatttctcatcattccttcttctcaaaagtcattcgtcagccccagacacctttgcctcggaaaactgagaactactttcaaaatcgtcaacacccccatctcctgctacagagcggagtccccactttgcagaggcgcactgcaaggtcgcgggtggttaaatggtgcgccctccttgatgaagat

SEQ ID NO: 150 - DNA, 6000 bp, Homo sapiens
caagcgccaaatattatatcatagtacccttatgtatttcagtacatgcctctaacagataaggcctttaaagaatatacccacgatgccgttatcacagtgacaaagttaatgatgattctgtaatgtttagtagtcagcctacattcaaagttccccaatggtctaaaaaatgtcttgttcaagtttacgtactcaaatcaggatccaaacaaggtatatgtattgaattctgttgatttgaaaaacaggacttttatctctgctttagctgagacctgggactgaaaacaaaaccatagttatagctacattttgagatgaggtgctaaactccctgtgttgtgcaaaaggggcattttaaaagagttttaagatttttagtccaacacccacctcaggatccagagtatttctttggggaaatgcagtagggaactgtggcttttttccctcccaccgtgggagagagaagcaaggtgtcgccccatcaccccaagctcagtgagacagtctttaagaaaacctctctgagaactcggtgtttactccttggagctagaaagacacgttgaccgatacctgaggaaaggaaagaggaaaggctgtggctggagatgtctgaaaaatgactgccaagcagagcaaagagaggtggttgagttcagagcaatctgtgacttctatcactggtagggcagagatatgagcctccataactagatatgatgggagggagggatgtggtcctgtggtcagtttaaaatggatcccacccagatggccttcttgctgggggctagtctctttcagcagaaagaggttggaggtgtagcatttaatacagaagctgggatggggcacttaatacagaagctgggatacggctgtagagagaactggcatagcctaacaagggagcagcagtcaagaattccaagtggggtgaagctctgagtccctacaaaaagaatcctgcaaaataagtagtcagctttgaatattcaccattcccagagagcctaaatggatttcaaaagtacttgtttgttcccattttcagctaggtagggggaaactaaggcaagggcgggggggaccaaccatgccctctcctcacttcagcatactcagtaccaagctgggagagggaagacactttaatgttacatatccttctgactttttaatattaaattggactgtgacaaagaaaaattggttcaaacctgggacagaatctccttctggaaagaaatctgctttgctgatagaacgcttaagcaattttctgataacttgtaataagattaaagcctcttctgggaaaccagctacttgctcagctgaccaacagtctgctgtctaataattttgaatccagtttagtaataattaagcatttattttacctataaagtattccttccacagggaatcattgaatggaagttaacaatttgtatcatgttgggtcctgcactttcaacataatgattacaaaaatatttcagggatagaaatatgccgatggataaagtaattttgcttgtccttaaaatcaatcatatcttaatatcaaatttctgagaaataactctagcaatcactttcaaatgaccccatgtggtgatgaatttgagagttacaggcggtacctcctcacttcaaatgtcatttggacacagagtactatctatccttatttcacaggttctgtgtattatctatccttattagatatacacatatagagatgtgtattatctatcatatgtattattgtcatatatagataatacacacatgtaaatgtgtattatctatgcttattttacagattctggtgcctggtcatcttttacagtcatattatataagcaggattttccctttctatgtattaccttaaacatgatcctagatcacaaaccaattgtcttaaagggttcaaagaagggaattaacaggttttaatttcaaccagtagtaacacaaagcctagttattccaaagctgttgctcaggttacaaaaccaaagcttcatataatttaatcatgcattgtacgtgaaggacctgcatacatttgtttgtataaaaagccaaataatcatatacagtcttggtagtaatatatttaaattggcacagcccttcgaaaaacagtttggcaatatatatcaagaacaatacatgcttatacccttgatttgatattccaacttcaattaaaaatatgtgggaaggaagctacatgcataaatattttcttttttatggtagtgaaaaatgagaagcagcctgaatatgtaacaacagggactcacagtaggtaaatgtgtggtttatccacctaatgtgatttattaaaatattcattggaaagactacaacatggaaaagaagaataaaagttgcattcatactataattacttaaaacatatattagaaacatttgcgtacattttctaaagacttagaatcacatattattggcaatccatgccgaaatggtacataaaaatttccgtttgctaatgttagactgctggcagacacagcaaatttttcagctaagcaaatgtcaattgttgctatagcacttctaaaattcaaataaacctacctaataattggcaggggtactcttgggtaaatgtggagaaaagtcaaagattaagaaaaggaaaatgtcaaccttcccagtcagtgactacttagaagctatgctatagttgtccgttgttatctgcaggggattggttccaggaatccccttggatataaaaatcctggaatgttcaagttcctaatagaaacatacatacacatattgtcctgtatgttttaagtcatctctagattatttaaaatacctaatgcgatgtaaatgctattatactgtattgttcagggaatgatgacaagaaacaagagtctgcatgagttcagtagagatgacttttttttttttttttggagacagggtctcgctctgtcacccaggctggagtgcagtggccccatctcggttcactgcaacctctgcctcctgggcaaaagtgatcctactcccacctcagcctcccaagtagctgggactacaggcacaggccaccacagccaggtaatttttgtattttttatagaggcggggcttcactgtattgtccaggctggtcatctctaactcctgggctcaagctgttcgccagccttggcctcccaacatgttgggattacaggtgtgagccaccgtgcaggccaagatacttaaaaaaaaaaattctgtttgaggttggttgaatctatggatgcagaacctgctaatatggatggctgactgtactagtggggaaggcacactaaataactaggataaaatctggtaaccactcgcagagatgactgagcgggatagaggaagattttggagaagggggaggcattccagatagagtagacccaagagaagaggttctttgttttaaacctctgtactgagagagcagaataaccgagagtgtcttgactatagtttaaatgcaggatttgcataagcaggtagtggaggctgaagaccttaggttctattttgaacgtattaagaagaatgatttaaaatttatgttgattctagagtctgcatggaatgaactgggagatggaagagttaagttacgaggtctctgcaataaactaagaccttcactacataaattaactgcactagcatttccagaatatattttactttaaaaatgatttaaccatattctaaccaagttttggatgatttttggtgttctctaatagaattggcacagtatattgaatcagattgcagtggattattttaactgtgtggccagatgcagagaaatatgccaaggtattgaggccaacaaatagagaaatgcaaattctcacaagtaaacagatttggaattctagaaggtggcagattatcaatagctgtatccagatcctttggagtggtggatggttttatattaaaacttggtaatagctcaccaggaaataaaattcagccttaaccttctaggcaattgggatgttgctgagaataatcaagacaatcaaaaaaaaaaaaaaaaaaaaaggtcgggtgtggtggctcacacctgtaatcccagcactttgggaggccgaggcaggtggatcacctgaggtcaggagtttgagactagcctggacaacatggtgaaaccccgtctccactaaaaatacaaaaattagctgggtgaggtggcgcatgcctgtaatcccagctacttggaaggctgaggcaggacaatttcttgaacctgggaggtggaggctgctgtgagctgagattgcactactgcactccagtctgggagacaagagcgaaactccgtctcaaaacaacagcaacaaacccacaccaaaaaaactgtatgaacagcagacaagatgactacagtgtttttcttttgtctgtttccactagcataaaagacttcatatttttaaaaagtttcttatcccagaaaatatcacaatccgtttagaatacgagttcaggctcaattccttcctgactgtacagaagagctcaagatgttgcagaccttatcttaaaagctggcttggtagtcacctaaacatttcataaataatttactaactctcaaaacactaaacacgcaggcccttgatttcaaaagccaatcttgctgggatggagtggggtgggggacctgggatgggggatgaaaggggttggaaatggggagatattggtcaaagggtacaaagtttcagttagtgtgaataataagttctgaagatctgttgtctaacatggtgactgcgataaatgtattgtgtccttaaaaattgatgagagtagatcttaaatgttctcttcattaaaaaatggtgcaatggatacgttaatttcattgatgtaatcatttcacaatgcatacatatgtcaaaacatcaccttgtacaccacaaatatacccaacttttatttgtcaattacactttaataaagctgggggaagccactctttttttgggcacagcatccggcttttatttactaactttgagaacagagtaccttgatcaattaaatggtagggagcgctgtggagacagcatcctccccagtccgggaagagaggcctaggatgcctggggcccagcggcctcttccctcctggcgtccccggctgccctcgctcccaggccccgcagtctcatttgccgcttccgacgcgtgaccccggcgcgctagcgtccgggaccggtgacaggcgcggggtgcgccaagcagtcccatgtgtcccctccctctcgcagccgccgcagtcgctgcgccccgagcccctctccggctcctcaacagagggctcgccgccgccatgtctaccgcccagtcactcaaatccgtggactacgaggtgttcggaagagtgcagggtaggaggcccctctacggtgggagatcaaaaaggttatgggaggaaggggagaaagctgtgagaagcgcctcccacctaaagtatgccttttcccgttgtggctgggacttccgctccgccatgacacagcagcggcggcggggagggaggcgaaacgcgcatgcgcccgaggacttggacgggcggaagtacgggaatggggagggaagtgggggagcgggagaggaggggtcaggggactgctgaggaccagaagtgggcggctgctgggtgcgggagtaagcggcacgggggaatgttgaagttgggtaggaaaagaagagggtcttttaactagtggtctcgttgcttgccactgaagctacctgggcttgacttgagttttaggaaggacacttagatggtttaaggttaatttttcagaggtcaaacctttttttagacctctttgtagctcttaaaagaatgaaattgttatctaatttttgtttcatcctaagtttaagtagttgcca

SEQ ID NO: 151 - DNA, 6000 bp, Homo sapiens
agagacagggtcttgccatgttgcccaggctggtgtcaaactcctgggataaagcgatccccctacctcggcctcccaaaatgttgggattagaggtatgagccaccacacttggctagattttttgttaataataaagaaatgtgtatttcttatacagtagaggtttttcttttaaactttttgattttgaaataatttcacagctggatgtggtggctcatacctgtaatcccagcactttgggaggccgaagcaggaggattgctcgagcccaggaacacaagaccagcctgggcaacatggcaagaccttgtctctagaaataattaaaaaattagccaggtatggtggcgggcacctgtggtcccagctactcaggaggctgaggtgggaggatcatttgaacccaggaggtcaaggctgcagcaagccatggttgcgccacctcactccagcctgggcaacagagcaggacccagtctcaaaaaaaaagaaagaaagaaaagaaaaaaatgatgtcaaagttacaaaaataaaaatagtacaaacaatacccatatatatatattatatatatacataatatatattatatatacataatatatataatatatacacataatatatataatacatatacataatatatattatgtatatatacattatatattatattatacatatatatgtatatatacacacattatatatacataatatatattatatatacataatatatattttatatatacacatatatatttttatgtatacataatatatataatagatacataatatatataatatattatatatatattttatatatacactaatatatataatgtatacataatatatataatatatattatatatacatatattatatgtatgtgatatatgtataaatctgtgaattatatattataatatatataacatatattatatattatatataatatatgttatatatattataatatataatatatatattatatatattatgtatacataatatatattagtgtatatataaaatatatatataatatataatatatacatgtatatataaaatatatattacatatgtatacatattacataatatatattatatacacataatatatataatacatacacaatatataatatatacacataatatacattatatatacacattatatatattatatatacaaaatatatataatatatatacataatatatatctctctctatatatatatgtttttttgagacagatttcactcttgtcaccgaggctggagtgtaatgtgcgatcttggctcactgcaacctccacctcccaggttcaagtgtttcctcctgcctcagcctcccaagtagctaagattacaggtgcctgccaccatgcctggctaatttttgtatttttagtagtgatggggtttcactatgttggccaggctggtcttgaactcctgacctcaggtgatccacctgccttggcctcccaaagtgccgggattacagatgtaagccattcatatattctttacccagccattcacatattctttacccagatccacccactattaacattttcctccatttgctttgtcctttgctattcatttaactatgtaatatatatgtttgcatatatacatatataataaatatttgtatagacatacacgtggtctttttctaaatcattggagggtaagttatatatattatgattctaaaatattaggtccattatatgtaatatttgaaacattatattatatatatgtagtaaatataatacagtcatgtgctgcataaggatgtttcggtcaaagaacggcatatacaatggtggtcccataacattataatggggctgaaaaattcctatgactgagttgatgtcttgatgatcctcacccagtgtaggcctaggctaatgtgtacggtgcttataaagtctacagtagtgtacagtagtgtcctagaccttcccattccctcaccactcactcacttactcactcaagagctactttcagtcctgcaagctccattcatggtaagtgcactatataggtgtgccattttatattttttatatcataatttttataccaaaaattgtaccttttctatattgagatatgtttagatatccaaatgcttacaattgtgttacagtcccctacagtattcagtacagcaacatactgtacaggtttgtagcctaggagcaataagctgtaccatatagcctaggtgggtagtgggctataccacctaggtttgtatactctatgatgttaagatgacagaatcacctaatgatgcatttctcagaacacatccctgttattaagcaatgtatgactgtatacggggaccaagaaggatattctttttcataaccacagttaatgttgccaggcttagcaaataaaaatgcaggatgccatgggcaaattccaacagaaatgaaagctctgagctttcccagactaggggaactactacacttcctctgctgaacacacttagacactgctgttggatttgatgggttctgggtctccttggttaccctccaacatccaaacaataaatctaatccgctgggcaagatttctggtaagcagtaaatgtctgctatgatcttgctgataaaagtgaaggttagttgactctttttttccatgtcttgaaagctctgttgatttggtagtgtttctcagaaatgaactgaataagaattgtcttataaaaaacactgtttaacaaatttaaatataactcatcattagatcttgttaaaatgtaggttctgatgcagcagaactggactggggtatgaaattttgtatttcttaataagcttccagaggacatcagcacagttgtcctcctaatcacactttgaattgtgacagtcaatagatatttcaaatatgcaggtacctaggccctatgccaatgtattgattcagaatctctggaggcagtgtccaggaatattaatttaaacaaactcctagggagatatgagaaccactgatctatgggtttgaaatatcctctatcttattctcaacttgtttattttgtttctgaaagcccagtgcaggtccctcctgcttgatgcttttttcattgaccacctcagatgtaaattcattaacagttgttggcagcacttgctatttatcatgggctttcttttcttacatatatcctgtctcctcagatgttacttctcgaagtgaacaattatatagattcttgtagcctcagctcctaccataatgcttagcagagagtaaatgtttaatatgtatcatggataataatggtgatggtagtggaagatgaatttctctccaggacacgtgactgttgcccaggccttgtgtgattaaaagaacaagagtcctgctgactccacaaaagaaacaatcgttagcaaaaactgcaactcccaactatggcacgtttttcagaaactggtaccacaatccttttgtaccttggtagtttgaattttattatggtaaatggcactttaaaggaaataaagtaatactttgaacttaatatgtcttttatctgtgaacctcaaagcagcctaatgccatttattaagttactgtacagccatgatgtaaatattatcataccttccttacaaaaaagctgactagggaaagagttgtaatgtacttgcccaaaatcatagccattctaagaaggccaaaccaagaaacggaggagtagctaggtggctgacaggtcagcacttctcagcatttcccagacctcaacttaggtgagctttccataggagagacggctaagaagtaacggaagactatttcaatttgggtgaaccaatttccttttcctccgtattcccattaccattgctcttggtatcttgtgatgcttatacattcttatatttaggttaaatgccgaccatcttccctcaacaacttccttatctattttccagtaatcttgttctccctacctcctagtttactatagcagcagagatattagattggtacaaaagtcattgccgtttttgccattacttttaatgccattatttttaatggcaaaaacagcaattacttttgcaccgacctaataaaataactgccagctgaggggatctgaaatgagattggaaccctagtttgaccgctcacgaactcggcctcttaggagaggtgtctcagggagtcagtttcttctttgtgtgtgaaacggaaaaggactacgcccctgtaccttactgagggattgaggcgatagaacgcgattcgtaaactgcacagcactaaacggataccactttgtccccttactatgtcattccttgtttaatttaatgccagggccacacagcgcagcataactaatagggatagggcgtgtctgtagggaactacctcgaggtagatctttttcttttgaggaaagggggaacgcggagctgctgggagtcgtagtctcggcggcggtctccgctgagctcagacaaaggaaagaactacaactcccgtgaggcagtgcgcggacagctcgcactgcccctcctcccccaaccggcgcgtgcccccaagagaaactgggggcctgcgcgcgcgctggggacctgcagggcaagcgcaaaggcagcttgctagtggtagccgtgagagcagatcgaggaaaggagacccttggcaaattaaaaaataaaaagaaccgtgcactattgcctcaccacccggacgggctgtaaacccccactacttcggaggcgtggggagcgcgctcccgggctccagtctagaacttcggggacttaaatcagcaagggcgggaaggggcggggcctaaggcgcggggcggggccgtaggcggggcgggcggcggcggcggcggcggagccaggacccagacatctgggactgttgttctctcgcggcgcgaccgcctcagtcacttcgcccagagacccggacctggtccgctggggagcaggcggccataaaccccctctctcccggttccctgacgccgcggcaggagctgttacgaacaccctgcggttggtctccgatgcccttcagtgaggtggggacgcctggaccctggtgagcgaaccccaagccaccccccaccccaactcagtgtcttcgccggcccccggcccgtacgcctgtctggtcgccatggctgaaaacacagagggggatctgaactccaacctgctccacgccccctaccacaccggggaccctcagctggacacggccatcgggcagtggctccgctgggataaggtgggtacctggtcagcccggcaaacgccgtcgcctcccccacacagtctgctctttcctgtgcccacccagcgccccgcgggctgcagaggagatggctcgggacaccgagcggggggcagcggagcagggcgttgccacccacctatgcgtggggttgctccttcggactgccagagccgggcggcaacatctgcatcgcttccttctgcagtgctctcaattgtaacctcccttcctcttctttaccctctttcctttcaagtgctgtcttccctctttcttcaaaaaaaaaaaaaaaaaaatcatcatcattgtaagttataccctaaacaacgatttcctttccctttttctcccttgacttccttctccacatacctgaaagtggtttctggcacccttactgggcgtttctaaccgctatccgctttagttctggtctggtgtgtttcctccttctgtcgctaggtagttgctggccttttatcactccctggtattgtctagtatcaccttttgctgttgggaaaggcaaggcgcttacctcttctttctcctgctggcagctattttctggaattaatctgttcaaggaatcgtgttttccaggtttcatgtggtactcttaat

SEQ ID NO: 152 - DNA, 6000 bp, Homo sapiens
aaatagaaaactcatttcaaaaacactggtaaatatatcaacggctgggcacagtggctcacacctgtaatcccagcactttgggaggccgaggagggtggatcacctgacgtcaggaattcaagaccagcctggccaatatagtgaaaccccatctctactaaagatacaaaaattagctgggggtggtggtgtgcgcctgtagtcatcccaggtactaaggaggctgaaacaggagaatttgcttgaacccgggaggtggaggttgcaatgaaccaagactgcgccactgtactccagcctaggcgacagagcgagactccatctcaaacaaacaaacaaaaaattcaagacaagccaggcagagtggctcatacctacattcctagctacttggaaggccgaggtgggaggattgcttgagcccgggagttcgaggtcagcctgggaaacacagcaagaccccatctcttaaaacaaaaatctggggccggatgcagtggctcacacctgtgagtcccagaactttgggaggccaaggcaggaggatcgcttgagcccaggagtttgaaaccagcctaggcaatatagtgagacccccatctttacaaaaaatgaaaaatttagcctagtgtagtgatgcatacctgttgtctcagctacttgggaggctgaggtgggaggattgcttgagtccaggaggtcggggctgcattgagccatgaccttgccactgcattctagcctaggtgactgacaccatgtctcaaaacaaaaaacaaaaaagacaagcaaaaagtgtttttttcaagacaaatctgtcagtgactagggtggaggaggaagtggtgggcagcggcggcacggtgggcaaacgcggagtggcagagcggcacgggacaggcatggcatttcatcatggaaaggaacccatgtcaagcagcctggaatctgcaggcgcacagcgacagaggaagaattaaatgaaggaaaaacactggaaacaaccttcaaaaccacaataataggggattttaacatggttctctgaaatttgacagactgattaggaaaaaaaagactaagggacgacttaagacacatcaccatagactcaatctgacaaggatgttctaaattctgtaccccatggagtcatcatgcttctccagtgtctgtgggacagttatgaaaatgaccaggtatgatagaacaaagaaaccctcaatatatttcaggtaacagcacataggacatgccatttgaccccaagtgcaaaaaaaaaaaaactaaaaatgagcaaaaacaagtagtcccctcacctccaaacgctgttagaaattaaagttcaatccttcaggtaactttattaactcaagcgctttgtgtatttaaggcagcaatgggtcaggcgtggtggctcacacctgtaatcctagcactttgggaggccgaggcaggtggattgcctgagctcagaagtttgaaaccagcccgggcaacacagcgaaaccccgtctctactaaaaaatacaaaaaattagccgggcatggtggcaagtgcctgtaatcccagctactcaggagactgagacaggagaatcacttgaacctgggaggtggaggttgcagtgagctgagatcgtgccactgcactccagcctgagtgacagagcaagactccatctcaaaaaaaataaataaataaataaaggaagcaatgaaattaatgaactaaaataacagaaaactaaaaattaacaaaattaattatttaaagtaggcaaagggactaataagaaaaagaagcaaataaattaccactgtcaagaaaagaattaaaaagtccaacagccagtatggtgctgacataaagacagacctacagaccaacagaacagaacaggacaggacaggacaggacaggacagcacagggccagaaatgacaatgacagacagatgaccttcaacaagggtgacaagaacttcttgcacaatggggaaaggatggtctcttcaatatgcagcgctgggaaaactggatatccacttgcaaataaagatagacccttaccttacatcatacacaaaaactaactcaaaaccgatgcaagacccaaacacagacttgaaactgtaaaacccttagaagaaaacaaagggaaagacttcacgacattggtcttggcaatgatttcttgaacatgacaccaacagcaagggcaacgaaagtaaaaatagacaaatgggatgacctcaaactaaaaagtttctgcacagcaaaggaatctattaacagaaatgatatcctatagaatggaagagactatgtgcaaaccatctatctcataaggggttaacagcctgaatatacaaaaaactccaactcaggaacaaaatcgattaaaaatgggcaaactgcacttttgtaatcccagctctttgggaggctgaggcacaagaatcgcttgaacctggaaggcggatgttgcagtgcaccctcaccaccgcactccagcctgggcaacggagtaagactctgtctcaaaaaaaaaaggcaaagcccttgaacagacgtttctccaaacacgccatgcaaatagccaacaagcacatgagtagatggtcaacatcattatttatcagggacatgcaaatcaaaaccacatgacactacctcatgtccattaggatgaccattatcacaaacaaaaaagaataggctgggcgcggtggctcacacctgtaatcccagcactttgggaggcctaggcaggtagatcacttgaggccaggagtttaagaccagcctggtcaacggagtctcgctctgtcatccaggctggagtgcagtagcatgatctcagctcactgcaacctccgcctccctggttcgagccattctccttccttggcctcccgaatagctgggattacaggtgcccgttaatttttgtatttttagtagagatggggtttcaccatgttggccaggctggtctcaaactcctgacctcaagtgatccgcccaccttggcctcccaaagtgctgggattacaggcgtgagccaccgcgcccaacctacactgtaacatatttaaaaatcaaagtgcaaagggtggtttctttctaaggatgaaaattattattcacatgctccacaccaccatgcagatcaagacgctgactacctctggcggctcagcaattctatcctggcacccccggagacagctgtcgcccaggtcttgtgtgctgctgtaagttattccttctcactgcattccccaaatggacccaccacaacctgctgatcctttctgttgctgatggacatgtaggctgtctccactctggccatttgtatttctcctggaaactgcttatgcccgttacctttttctatggaaacagacggctgggacagaaaccacggccacagcagccagcgtgtctttgccagtggggtcccacactatgaaatcgcagctgtggcctcggtgggtgtgtccttggcgggtgcatccacacactttctctcggaactttccggactctcatgcatatgctacagctttccaaacggcttggccgtgcggagttacgcacccacctgcagcaggtgatctccagctgctctgcattccaccaacactacgtgacaagtctcaagttcagccgcctgggggctcgggcaccccattcctgggagaaatgatgatttgtgcactctgggccattgcatggtgtctgttcacgtcctttgcccgttttttaaaaaactgggttgtcagccttttccttcctgacttgtagttgctcctccatcctggagagtcctttgttgaaaataccgcaaatatcttctgaagaggactctcccagggaacattcactacaactgtaacgaccacagagacacagagctcctgttcactgtttagcccaggactgcggtgacaggtgcacccatgacccgagatgctggctgcgtcctgtggggtttcctgcatatggaagttttaaaagtctaaagcctggcggtccaggaggttgcgtgtgtgtcctcggggaggaaccctcctgacagccaggcctctggagcttcgtctgcacgcgagcttggcatgcaccagctgtgcggcccaggccaggtgacacggcctctgaagtctggtctcctcatcagcaaagccagtgccccatgccacgcacctcccaggattagccccaggccgggaggctagaggccccacaaggagcgagcctgcgactgcgatccacaggcagagccacagaggcagggcgcgccctggggcccaagctccagggctgcaggcccagggccagatcctgacttgcccacccgccggctgtgtgaccttcagcgcgcgactaacctctctgtgcctatttcctcgaggaaaatgccgggaaatagcagcgcctgcccctgtaaagccctcagagcagagtggaccgcgctctctgcaagcgctggctgctggcgtccgtagcaagctaaatcgcgaagcatctgaacgaacgaggaagcccaacgaccatcccacaggccgcggccagaggcagactccggaatgcaaatggccaaacaagcaggtccacctgcgttcctaaccaaaagatcgctaactgaagaacgggcgcaagcacctgcgcatggcactgcgggtctgggggcggccgcctgccagcgccgggagccgccttccacggctacctctgcacagcgcgcggctcgcgccggttgctgggcagaagctcgagcagcttcgaggatgtcgggcctgggggcggggccgcgaggcagcgacgtcgcgcggggcgcggccctgacgcagcgtgacgcaccggcgccgcggcgggtacgggctcgggcgggcgggcgggcgggacggcgccccccgcggccgggcctggccgggctgcgctaggctgggctcgggcagggtcgcaggggcgggggtggcaggggagcgggtggcagccccgcgggtcacagcgccgccgccgcccatgctgctgcccctagcctgcctgcacggccgcgtcgctcagtgcctgacctccttgcttttgcttgcagagccgctcccgaggccccggcgcggcgcgagggcgcggggcgcggcgtccacaggcgccgaggctgcccccgccgccccgcccgcgaagatggcggcggaactctacgctcccgccagcgccgcggccgcggacctagccaacagcaacgccggcgccgccgtgggcaggaaggccgggccgcgcagcccgcccagcgcccccgcgccagcgccgccgccgcccgcgcccgcgccgcccacactcggcaacaaccaccaggagagccccggctggcggtgctgccgccccacgctgcgcgagaggtgagcccgtgccccgcggcccccgcgcccgcgcgcgcccacgcccccagcccgtgcctctacctttgcaggaacgcgctcatgttcaacaacgagctcatggccgacgtgcacttcgtcgtggggcccccgggggcgaccaggacggtgcccgcccacaaggtgggtagcggcggcccctctcggaacgcgtgccccgtccgccccgtccgccgtgtggctgacacgcagcctgcgggagagccaggctcacggcggcgctttctcctcccagtacgtcttggctgtcggcagctccgtcttctatgccatgttctacggagacctggcggaagtcaaatctgaaattcacattccagacgtggagcccgcagcctttctgatcctcttaaagtaagtccactctactggggagggacgggtgggtccgttttaggcggcctccggaggcttctgaagggaagcacacaggagctgatggactcctctcccaggcccagccccgcgatgggtgcttgggagccagcccctgacgcgggccctgcctcgcctaggtacatgtacagtgatgagatcgatctggaag

SEQ ID NO: 153 - DNA, 6000 bp, Homo sapiens
ctacttgggaggctgaggcaggagaatcacttgaactcggaaggcacaggttcagtgagctgagatcgcgccactgcactccaggctgggcaatgagcgaaactgcgtcccaaaaaaaaaaattattctcttaaacacagtatatacaaagcactctcacattgctgatgtgaatgtctttaaatgaaaagcaactggtaatttatatcaaaattataaatgcacaagctcattgccccagaaattccaattttagaaatttaacctacagataaatccacacagctgtgaaatgacacgtgttcatggctgtacattgcagcattgtttataatagcaaaagactggaagcacatggtgctgtcatgtgcttctggtgaggcctcaggaagcttacaatcatggctgaaggtgacagggatccagcatgtcacatggcgagaataggaacaagaaaattaggtggggaggtcccagtttatcgccaaggggatggtgctaaaccattcacaagggatctgtccccatgatccagtcacctcccaacagggcccacctccaacattgggaatcatatttcaacgtgagatttggagggatccaacacccaaactatatcacagtctcaatatccatcaatagagggttggttaaataaattatggggctgtgtgtggtggctcaccctattattccaacactttggaaggccaaggcaggtaggtccctggaagccaggagtttgaaaccagcctgggaaatatagcaagcccctatctctacttaaaaaaaaaaaaaaggtacatcaataatctgaatactatgcagctataacaaaacacaggaaactgtttatgcattgatatgaaacaatcttcaaaatctattggtatatgaaacaagtcaaaatgcagaatagtgtgtaaagaaagctaaaatttggccgggtctggtggctcatgctcatgaacctagcactttgggaggccgagacaggaggattgcttgaggccaggagttcaagaccaacctagccaacatagcaaaaccccacctctattgaaagaaataataaagaaaacaaaaatttgtgttaacaagggggataagagtatgcatgtgtatatttgattgtatttacataaaacatctttggaaggatagggaagaagaaccgagaggctgggaataagggtaagagagacaagttttacggtttgacctgttatacgtttttggacacaggatgttgttgttgcccagattggagtgcagtggcagtatcttggctcactgcagcttctgcctcccgggctcaggtgatccttccacctcaccctcctgagtagctgggaccacaggtacatgccacaacattggctaatttttgtatttcttgtagagacggggttttgccatgttgccaaggttggtctcgaactcctgagctcaggcgatttgtccaccttggccttccaaagtgctgggattacaggtgtgaaccaccatgcctggccccttttatactttttgaatcttgatttttgttttaagtataacttactcaaaataaataatgaaaatgaaaacaaagcacaataacaaaaattaaaaacatgccttagcaaaaataaaactaatatatacacaaaatcaaaacatacaaactagccaggcccggtggctcatgcctgtaatcccagcactttaggaggctgaggtgggtgggtcacctgaggtcaggagttcaagaccagcctggccaacatggtgaaaccctgtctctactaaaaatacaaaaattagccaggcgtggttgtgggcagctgtaatcccagctactcaggaggctgaggtgcaagaatcgcttgaacccaggaggtggaggttgtagtgagctgagatcacaccactgcactccaacctgggcaacagagtgagattctgtcttaaaaaaaaaaaagaagcaaaaacaaaacatacaaactataattgggtataagattaaaagaaaaaccttccctcctccatattccatgcatttattgtattctattttattgagacagggtctcactctgttgcccacattggagtacagtggtgcagtcagttcactacaacctcagactcctgggctcaggggatcctcccgtctcagccttccgagtagctgggactacaggagtgggccaccacacttggctcattgttaaattttttgtagagacagaggtctccctatgttgccaggctggtctcaaacacctggcctcaagtgatcctcccacctcagcctcccaaagtgctgggattacaggtgtgagcccccatgcctggcatccacccatttaaaaagatttttcttgttttttcttctttttttttagagatagggagctatgttgcccaggttggtcttgaattcttgggctcaatcaatcctcccattttggcctcccaaagtgctgggattacaggcatgagccactgtgcctcgctgctttttgtctttttgtattaacagaaaaggtctcactatgctgtccaggctggagtgcagtggctattcacaggcataatcgtagctcactgcagccttgaactcctggactcaagcagcctttctgcctcagctcctcaagtagatgggattacagtctcgtaccaccacacccagcttaaaatgatatttattgtattttatctggcatttctgggtgtttttttttggtatacttattcatgccacaaagtaagtggtacttatataagtgtacagtgattttccaggttcctttctaacatagcttgcttaaattcacaggtcgactaatgtttcatttcatgtgcatgctaagtgaagctggttagtgatgaccataagcaggtggagaagctttcaatattttacttattttatcagtactcctgattttataaatgatgaggctcattaaccccattcctactcaaatctcctgataaacttggttataatagggcttcatggggatccaaacatttttaataatgttttgaagcatcttggtgtgggacaaacagctcaggctaccccagagccccacatccaatgacttagaaaagtctgtgttttatagtgggaaaagtttggattatttagtccttcacattggaaagggaagtgttttttctcagtcttttcggtattaacaaataccttttatattactatctatcccctctgccctctatggactcttattttgaaagcaatatccagtggacagccaggatttgttacataacaattaatcttgaccttaggacttgttgttctattaggttggtaactttgtctgatccaccaatcatattgctgtcttgtcagtccatcagtttcaagaaacaactgtacatgtcagtgccctgatttgtgtttgtttttcttttttttttttttttgtttcgttttggttttttagagacgtggtcttggtatgttgcccaggctggagtgcagtggctattcagaggtgtaatcatagcacatttgtagccttgaattcccaggctcaagtgatctttctgccgaagcctcctgagcagatgggaggcgtgcatcactgagcgcagcaattttactaagttggtctagtcctagctcagtagttctttacttagcacagagggggcttcttagaatctcctaaacttgatcttagccaaatggccaagaagcaatccttagaatcttctaggagagcctttctaaatgctgatactgcaaaccgaaaagtatatgaaacggatctcaattaatttagaagttaattttgccaagtttaaggacgtgcatcatctttggagacaggtccgtgcctttctccaaagatgattttgagggcttcagtttttataggggaaggggcagatattggggaaagatgaataaattttaaaaagatgtgggtagataagaggcaaacggttgcattcttctgagtctttgatcaaccttcacatgtgaggggggtagagaaatagtcacttatgcattcatctagctcaatgaatctgcatttttacataagataaaataaaccggggagccgggcgcggtggctcacgcctgtaatcccagcactttgggaggccaaggtgggtagatcacctaaggtcaggagttccagaccagcctggccaacatggcgaaaccccatctctactaaaaatacaaaaattagcggggcgtggtggcgcgcgcctgtaatcccagatactcgggaggctgaggcaggaggattgcttgaacctgggaggcggaggctgcagtgagccgagttcgcggcattgcactccagcctgggcgacagagcgagactccggtctccaataaacatggaaggctgtttctccccggtttgctggaataaagtctctgtcttccaaattccttttcggagaacttttgttcacaagattaaaaaggtcacgcagctggtgacggagcctgggttttttgatttagacattgtatccatgtgtgagatcctgcccatccccgctttcttggtgtcctgtgagtttaaattcatgaattcactctcaactgccaccgctaacaggacacaggccaattccaacacgaaccccaacggctctcctcagggtcacctttcatgagtccgctttccggccaacccctcctctcagtcttaggccccactgcaagcctactcccgctcaccgtacagaacctaagcacaggatcagagatggggacaggttgactcagtcccatgcccaagtccgcaaattagggattcggctgcctaagggctagagaacgctccccgccccacaggacgcgccccaccccgccccctcctcctgcccctacgcacgcgcactctcacgcgcctgtgttgccgcccgcggccctggcttcgggcttcagggagctctggtgcagtctccgcctgtcagtgccggcagtcgtccgcggcgcccgccccggtcccgcactggtgcagccatgtcctcttccccgtgggagcctgcgaccctgcgccgggtgttcgtggtgggggttggcatgaccaaggtaaaccgagcagcggccctgctggccctctgaggctcgggggcggtcggtgcctgggtttctctgtccctccggtctcctagcttcgactgctccgcgcgtgggtcatcggcgtggcgacttggtggcttgtactctgcggaatctctggggtcatagcgtctcgggctggttcctgcggccttctgcttcctccttcccttttcttctggtcagagttcatgaagcagccccgagataatccaaggatctcacctctttagattctgagcggagtcccgaggtgtgtgggctggcttgccccggagggaggcaggtcgcgaatgccgcctgctcggccctcccaggaacagcccccacaggagccctcacagagacagctccagatgtggatggcgaggagaaacgctcctgatgcccagcgcctcggcccgagtggcagattccggcctccctctgtccctccagtgactgcttgggacccggacgccgcaggctcccacggccgttttcccctcatcgcccgcatgctccttaatgccaaactgcctttcgtttctccccggacgcagttgtctgatgcctctgttgctttgcttctgttctgtttgtaccgtgtatcttcacctgttaacttttgtgcatcctgaaaggatccgttcagatcggatcttctccaggacgcctcggatcctcctgactttcccctagagccttgcactgtgcttacctctgtcctgcacttactgtgctcggcagtaccgggcagtactaaagctcataggcgtctgcgcgccctcttagcatggcagctcctctagactgggtacctggcttattcactgctgtgcccctcgccctgaacgttcctgatgcttgaagaccctcagtgaatgttagttgaacaatac

SEQ ID NO: 154 - DNA, 6000 bp, Homo sapiens
tctcaaaaacaaaacaaaacaaaacaaaaaagaatcaaccttgtattagaacctggcacagactgttggcactgttaaaatataaaatagtggtcagggtgacttgcagaggaacaggctgccccaccagtgacagtgacaaagcagtggagcacttgctgcaaacatggcctctgactcaggagaggcagtcactgttgagagttaatccatgatcacacttgggtatctaaattgccaaggaagcttcatcagctgctgcaggagtgggcagtgtggcccaccaagttcatggccagccagtggtgagaagagacaaggctgagacccagagacaacccagaggccttcagggggcagaaggagcggggtttgggcagagagaacaatggcatggaggtctaggagcaatgaggccttttccagtcacgagggcccttttagaatttatttctgcttaatagcacttaataaacatttttgagcaatgggatatgttaggtcaaatgggggatataaagagagttgacacagaacctttgcccttgaagagcccacagctgagttgaaggaagagacctagagcacagtttactaacatcaaaccaccaacccccacagcaagagcagcttcccagcattgagacctcactatgctccaggcattccatgcatcatctcatatgcacttcataacagctcatcacgaagagaagtcaccgcagatccaatgggttaagcaagctatcgaaggtagtcagcaattttgtctgactacaagttcgtgtaataataatgtgaaccactccttgaagagtagaatccaagcattgtgaggctggcagtgcaggcaggggaatagcatgagcaaaaaccagaggtgggaatgaatttaactgccccaggaggaggcccaagacagctggagacaattcaggcagacaggagagcccgtagctgctcagctgctccctgtctttttccttccctccgcaaccttgagaaagttgtcgatgggttctatttgcattttctcctatccagttcctcctgcccacatcacccactgcagacactcttgccaagttcctcaatgccagcgttgccagcctggtggccactcctcaggccttctcttgcctccccagcagcctggccatgtgcccgccctcctccattttgaaagagtaccctcagctctatcaacacctcctcccctggtttactttcctccactctggctccgtcccttgtgccaccttgatattgctgtggcccatcctggacctacttctcatcaacacagtctccctaggagactcatcccttcttgaggcttaaccaccacctccacgtgggatttccaagcccatatctctagcccagtgtccaccctgagtgctggacccatatacccatctgactcctgaagatctttacttgggtatagtctgggaaatttgaatttcaaatgtgaccaggatactcactggcttccttcaatagtgactgctccttctgggccccctctgtcaggagtgggcatcaccaacgctagttgcccaagccagatcctgggagtcatcactaacatctctcctctcactgatatgtgggtgccacctcgctttgacatttcttaagcttttctctccttcctaccaccatcccactgctgccatgccagcttttatcatagctcctgggattccttccacagactacctaattccactctggctgccagagaggtccatgtgaaatgcaaattagcccaggtcacccttggttagaagcctttaacggctccccattgtgctggggagaaaacctaaactcccagcctctttgcttcacacacacatacccactgcgcttggtcttgagctccagccagactgaaaccatggagtaggtttaccctctttaccctaatcctctcaatcctactagttcttagggctcagcttgacagtcgcctcctcctagaagtcttcctgctgtccaaggtgcattagggctccacttctatgctcccatagcagctgtgcacaatagctttcttcctacatcacagccacactttctcttcttgtttcccaccctgagaccatagagtctttgaggtcaggagatgttcttgtggtttagctttttttaaaatttatttatttatttatttatttatttatttatttatttatttatttgagacagagtcttgctctgtagcccaggctggagtgcactggcacgaccttggctcactgcagcctctgcctcccaggttcaagcaattctcctgcttcagcctcccaagcagctgggactacagacacctgccaccatgcctggctaattttgtatttttagtagagaaggggtttcaccatgttggccgggatggtctcaatctcctgacctcaagtgatccgcccgcctcagcctcctcaagtgctgggattagaggcatgagccaccgtgcccagcctattttttgtattttttcagtgctaggaaatatttactgaaatttaaggatggaaagtctgggagaccgactctaggagtgctcttgaaaggaaatgggttactccatgtgtaggtgttgaaaatgtaaaacacaatattatttctccctttttccctaataaaaccccaattttgttcagaggacagcaatagtgttaattacacttcttagcatcctttgcagggggtagctatgtgacccaggtttggccaagaagacttaagtaaaagcaactgtgcacgcaagggagagatttgctcccttgatgtaagcatggccccttcctgtttcctgtcttccacatctttcctggaattaggagaggaggctggagatggagcagccatcttgtgacaatgagccagccacagggatgggaaccacaggctaaggaatcttgaagggcctaggtcatgacccctggactacctactagcagacttctaattattgagagacaaataaatctcatttaagtcattttggttggctctccattacatttagctgaactccacccagtaaaggtcaatgaaggaagataagcatctgtgagcatttctgaataggcttttcctttggagatgatgctggcgctgacgggaggcagagggccaggttaatggaacaggactaggtgagggctggagaggctgatcctcccaggggttctaccagaggatcacagtgaggcctcagggtttgagaaagaagctccaggcatggtagccctaaggtgtctgtgaccttggcctgggggttttctggtccctgtttggttcaacttgcaaaatggggctgttggactagacaacttatcagaaggcatagtgcttcaagtctgggcttaggagtcagacaaggctgaattcagggtccagctccaccacttgctagctgtgtggctttcagacagctttcttagccgactgctctagcatccttgtttgtggagtccagactccatcagtacctatacctgtagggctaacgttggggcttcatgaaatcatgcatgtgggtgctcagcagagggcctggtatgcccagcacacaccaagtgctccatgctggtacctgtccttgtgtgccatgttctcccagtggacagatgggacctggaattcatgcctcctctggggctggggctggggctgctacagtgctgtggaaagcctgtcaggatgtacctcgctctgtggctgagtgaagaggccagaggctgcccactgttcaacatctttggaatgctgccgtgtccagggaacttgggtcgcaggtggatagaagcccccaagcccaggccaggccagaccaggcccagaaaggtatcaggtcttgggtagaataagaagcctatgtggtctatctatcctgtggcctttgtcttagccaaagcctcctggatattgacggcatcttttcctgggtttggggtgggcttggagaggttccctctgcacgggactacagaagtgagggagctggaaaaatgcctccagagctggattcctcactgcagctgcttttggaagaaccttcttatccttcccttgagaagcctcactgtctcttctcggcgcttggaatcctgttagtagaaaatcttggggaaaaaataaacccactattcattccagcactgagaaggaggtcagtggggtgcgtcctgtttgtccacaccccccccaccccctctacccctccccccagcaccccaggccagacccagccatgctgacacttgacagcccctgcagtttaccttggctcaggtccagagacttcgggcccagcccccaccttttcaccttgttacccagccccctctccagcgcaaagagcagtttaaatataaatcagtcctcaacacaaacagagctgcagcgagtctcagagccatcaccggaactgagggcccaggttttctgcgagtgcaaacaagcagagactggctccgtaaatctccccaagaacgtcgggaggggtgctggggctcccctccacccccggctcacgttggcccctccagcgcccgcctcgggcaccctcatatcccagccttcctgccccccagccctgccaacctctttctccatcccctccactcacccaccttcgcttcgcccaccctctcttcgccagtccccaggaacctccacccccttgcaacctcctgcccccgcacagccctcacctcccctccccgggcccgccacctccttccctccctctccgcctcccggcaggcgggatcttctcggggcagtcaagcctcgcgggtcgctgcggcgtcacacctgtctgagggggcggcggcggcggcggcggcggggcgggggctcgtagcgcctttgacacccgaggaaaagagggaggagggagagcgcgtttcatcatcggcggcggccacttataaaaacttctaggcgcgcactcgctggctcagtctccgctccgcgaatctcctccggccactgccgccgcggtcgcctctcacccgcccggccgctccagcccgaggcgccccgaccccgcgccactccgcgcccggccagccgcccgcagccatggggctcctgcccaagctcggcgcgtcccagggcagcgacacctctactagccgagccggccgctgtgcccgctcggtcttcggcaacattaaggtgagcggagtccgcggggtcttccgggccggagccgcgcctggcgcaccttcggctgggcacccgcttctgtctgccggagccaggaggctccgggagccccgggctccctcctgtgccgcgctccgatctcatccccgggcgacgcgtgctgggcgtgtgtgtgcgagtgtgtgtgtgagcgtgtgtgtgtgtgagcgtgtgtgtgtgcgtgcgagtgtgtgtgtgtgtgttcacacgccttcatcggactaagtaatgggacagtggaagtacctgcttaccgcttactcggacaactccaggcagagttataagcgagagaattgtcctcgatgattgaaaaagatcatctcgaggaacgctttttcggcctccagcgggcggttacttcgtcaatgggatgggcttggaggtgccagggggaccccccgcgctttgggggacagactgtgtctcgtccgagccccctcgtcctggggtgggtggcctaagggatgttctccttccccaggctttcttctcccgccaacgggggcggggggctctgctacctggctgtgccgctcgcagttatgtttagaattccctctcagcgggcggcttccccaggctggcaaccaacccgcgtgctcagattggcttccctggtctggaaatggccccaggaaggtcacagctctcacggttcagtaaggtctaagcaggtccactcaccaggcaagttatggggagcgggtgagaagatagggtgttggcagctgttaggatgagagcacctttcccatggggtcggaaatg

SEQ ID NO: 155 - DNA, 6000 bp, Homo sapiens
cggacggcatcaaatgaagttttagaaaagccttgctcccttgagaactgcaaccttcctgtctgcccctcctcacctcagtgatgcaaaagagattattattctaagtgaagtaactcaggaatggaacaccaaacatcctaagttctcactgatatgtgggaactaagctatgaggatgcaaaggcataagaataatacagtggactttggggacttggggggaagatgggagggggcaaaggataaaagacaacaaatacggtgcaatgtatactgctcgggtgatgggggcaccacgatctcacaaatctccactgaagaacttactcatgtagctaaataccacctataccccaacaacttattaaaaaaatgaaacaaacaaacaaaaaaaggcctcttgctttgtcttgctctctcatcctcttgatgcatgaagacctgagctctgcagccattttttttcccactcaggtgtaaagggctcataagtgtcctgcttcttatttgcataacaaacagcatcaaagccttgacatcaaaggatgaactctgcagttaggtttcctgggggcttccggaagcccaccaattgttgtgtcaaatttgtatatttaagatgcagtagcttgtggtagaagcgttttctaacaacggtgggaatttcattaggtagagctttggttattcattaccacttggttgtgggactctggattcctcacaccttctttcacgtattttttacactattctatttgaagacaagcatagcctctaggtccaaatccagtggaattacctaggaatataaaagttggatgtcagctgtcataaatcaacaataaaagaagagaagaatttagaatttatttcccttccctactctaggagttaataaaataaagcatcttattttctcatggagcacgaaaggtaaatcacagtgcttggtttccttctggaaggaacaattcaagctgaacaaatgatttctcatttcaaaatgtgaatgcttattaattaaatattattttacagaaacaatagccaggcatggtggctcatgactataatcccagcattttaggaggatgaggcaggaggattgcttgagcccaggattttgagaccagcctgggcaacatggtgaaaccccatctttactaaaaatacaaaaaattagccaggtgtggtggcacacatctgtagttctaggtatccaggaggctgaggtgagagtatcacgtgagcctggggagggtgaggctgtggtgagccatgatcacaccactgcaatccagcctgggtgacctgagtgagaccctgtctcataaaataaaaataaaaataaaaatgagtaataacagctggctaacacacgccaggtactataccagaagctctataacattcattcagtatttagaagaaccatataatgttaactatctacaatttgtagatgagaaaaccatatctcagagaggtcaaggaacttaaagacacacagctagaaaaagcccagctaaagtatcaaattggggttgtctgaattgaaagttctggttctctaaaagagaactcagggagtcattggagcactatgggcaggttccatttttttcacaaaaaatccaccaggatgcctagaaaaagcagagtggattcatcttcttattctctctgtctctccagtctttcatacaccctccttatcattatttgtctacgggtcaaaggctcctttctctttactttggtgaaattggccctccacatacaggtggaaaccccgggatgcttggtgctatttacaaacgtcttttacggattaaaaacacctttggaattcaatcttaattcaattcagcatttacaaggtacttcgtagctcaaacgtttgtggtaggcactgtataaaaaaaagtatatcattgttttcagattattcaattactattttcattaagtgtgtaagcagatatgttttgacatgtttcttagtgtattcaaaataaccccaaatttttactgtagtaagacttgtcttactcaagagtaaagcaattttattttaaaattaggtgattttaggtacttttttaaaggtatgatattccattgtatccttatgactccgttgatgtgttgtaaacagtctccaacatttgaaaactccaggttgtcttcccataatgtgggtggttttctgcattgatggtggcctttgtccaccatcatttttaaaattttgccttactcttcaaggaatcatatctgctaggttagaacacctttgttctaggtagtcacaatggacagaggaattttcagcagctcatttctgttctgcaacccagaaatgatttaaagaggaagttatagttcagtttttccaagttagcatttcctgcttcttggttctcctgattatcgggctgccttgggtcctgaactaaaacataggaagaaaaaagggaaagtcagtgaatgtactctagcaaatgatgccttgctttcaggcagctgtgtctggaaagactttgtttaatattcaatgtgcatatcctggggaaaaaaatggtacatgttttagaaattttactgtttataacaatgcaggcagtcagtttcccgtttcaaacacagatagatacatgcaacactcaagatcctgcagagaggcagccagcatctattgtttaaaaaggtttcaaaaagaattcggattgctcttttctcttttgaatctgtgtgccaaatgacagggaccaatattcgtcttctttttctgtaaaactcagaaagacacatgaaagaacccagaaatgcatttcttaaagggatttagtgcagttattttaaataatttatgcacgcacacacacatacatatatcccccgagtacatattttttccctttttacttgtgtgcaatcagtagctacaatgactgaaatccacttctttggactgtgacatttaagcaaatcttgtatctagaaaccgaaatgcccagagtctcgcacaagctgttcgtctgggccaccaactcacacagccgccgcccagcgcctcggcacgcgtgctcatcttgtgtaaaagtaaaagttgctcatgtcattagctcggctctgagtttgcatgagaaaccagcgcagctctcgagccacgggagaaaacacgatctgctgcggagcccagtgacctgaaactgtagcagtgactcgagacctgtcctctcctcgacgtcgccctataaccctcccgctttatttaggatccgcttttccgagagcagccactcaggcaacccccggaaggtttgttaggagtttctccttgaaacgctttccgattccatcttttgaaatccagcaggcgagagtcacgacagactccaggacctcttgagcgctgtccgcagccccacggtaggagtagccctagtgcacgagacttggcggtggctgaaaagctcgcccaaacgcacgcaccacctctctgcggggttgcggattgcgggttgcggtctttgtccgctcgcccttcctccggggccgcacactcccgcatctggccggcaggtggcgcggttggctcacgatgagctgcggccggggctggagaggctcctccacctcccagcggccgcccggccgccgggacccaggctccccaggaaaactcggccctgctctggagggagtcagaggaggggcggcctgggaaggggaagggaggcctcattgctaggaatcagtgcccctgccagcgcctggggaaatgcaccgagtggcgttggggaccggtccctgggacaccggctgcgctgccttcgccggaccgctcttaggtggccgcgtccacggctcgggcatcgggaaaagaccacagcccgatggtgccagtgcccccggggccggagcagccgggcggggctctgcgggtcctcctgctcgccgtcttctcccggggcagggagggctgccccggctaggtcggagcggagagtcgcagcagccgctccgggcagcttcccagtcccggtctgccttgtctgtgcggctgcaagtccccgcacccacacttaagcctttcacttctaccccaccgctcccagacgggctaggcccggttccagggactgcccccaaccctgcccccgggaaatccacaactggttccctgcccaaggccatctcggggcgtcctgggccctgggcgaggtccacggcgtgtgcagggggacggggccagcggggacttccttactgctagaaagtcattcgttcagtctctggagacagtgacggagccctgctgcggactggacgttggggaccaagtaggtccccgctctccaggcatctggggagccagggaagaagcgagtgatagagccacaaaactccccgcaaagagtatttcagagggggaagcgccataaagacaaaacagggcaaggtggcagagggtggcggtggcaggcgcgagtctgcagctcagcccgggcgcgctggacgcagacacgtcgactctcctaaagaagcaaccgcaggtcagcttagacttcttttatttcaataaaagagcgttttcctccatcttaaaccgcccgtggtgggagaaaaggtttccaacctcttctctggctcccctcggtcaattccgagcttttccaaagtccctccgccgtccaggggctcgaccttcgaggtaacgtgggggatcccgctggctccctccggcaggcgggggcggggaccggccgtgctcgccccctagagccccgggagaccgcgcgccccgtggagcccggagggggcggaaccctggggcgggccctgctcggtgaaggcggggctcggccgccctgtctgcgccgccattggccgcgggccccggactggcgggctcacgtcaccggccgggcccgcccccttggcaatgtcttcagcccgctgctctcctaacttaagcatttattccactgggatagaagcggcaggagcagcgttggcaccggcgaaccatggctgggattttctatttcgccctattttcgtgtctcttcgggatttgcgacgctgtcacaggttccagggtataccccgcgaatgaaggtaagagcgggacggcctttctgtggtcggggacagcgaggggccatcgcgggtgaggggtcctcaggagcgcagggccaggtggtgcggggggagcccagtgtgaatggtgcgtcccgattcgggagaagggggctgaggcgaggggatcggcgaaggggcagcggggaaccgccggacagcctgccccgaggcggtgacccgtgcacgcggcgggtctgtccaagtttgtaaccaaaggccaaagtttatcagcatccgccagagaggcccgctcgaggcgccctgaggggatgcacgggagacaacgccgggatttaaaaaaaaaattacaagaaccacgtcctctcctgagccagcccggggcgaggggaaaacgcagcctggagcacagtgaaggcttggtgctcccggattctagcgaaagcctttcgagctctggtttctgcaaagtttcccgagccctgcgcttctcgggaccgggctgcggggcctgctccgcagcgcagcggtcgtggcgccgctcgtcaggcgccagtgacctgatttctagcacccggagtcagacacctttctcctcgccaagcccagcgccccgagggtgcgattgcgggcctgaggggcccgagctcttcgccccgcagacttggggaacccgccggcaagttgaacgcagtcgagttttagcttttcgccccagaattgcacacagtttagagctaacgtgcggggtcgacgggacccgtctgggtgctcagttttctgtgcatccgttcggacgtgctgggaggattgtatgtgcctgtgtgtctgtgtcgggaggtggggcggggcgggggggcggtgatcatttagtttctgagaaac

SEQ ID NO: 156 - DNA, 6000 bp, Homo sapiens
cactcagctccaccctctgccaggaaacttttactttctgactccaggagggtagtgaggcatgtcagtcactgccccacaactggagccagcaactggttcagaggtggccatgtggcccaacttacatccatgatctggaaaggtacagctcccttccaccctttgaattttgagctgcggaatgcggcccgggctactaaggcagataaaagaatgagactcaaacaggcagaagccaagagagcagagaagaccatggtgttctgtcccggacacacggtgcctggatgggctccagcttctcccgagtgccaggtgcccatacaccccaccccggggttgtcctcccttccagtgagttttggactaaggcggataattggcaaaggacattctcttcctgtcctatggcccctgtgaacacgggcaggggaagaagggccagtgattgtctcaccccaaactcctcccacccacccgtaccaaggttcctcttctctgactctgcaaacctctgggaagctctcaggcctcacagagaagactggagggccggatctggttcactctttccctagggtctgaaggatctgcgccctgtgttcaaggacgacgctgaaacattcttttctgcgtgcctgatctgaggcctcacaactcaggtgagcaagactgtgtccctttcacatggagaagccgagttccacggaggttgagtgaggagccggcatcacacaaggactcggaggggctcctcgagactcgcgggacagagacggcagccccaggtgggaaaggcccaggccagggacacgctgggcctggggtgggggaaggggggagccctcgggcgcccccacgaggccggcgcgctccaggtcctggacgggatcgtccccttgcgggcccagtgcagggagcgcggggagctggccgccttcttcctgcttaggttttggcgccgccgcttcttctccacctcgtccgccccgcgctcctcccgctggcggcgccgccgccgccgctcccgcgcttctccctgcgcctcaagcccctagggcaggcgctaggcgttccggattgtcgcgccctccgcctggttcggcaggtctgtccgcggccccttcacgttggcctccagctctcgtgccttccgctggtcccggccccggagttcagcagcgcccggacttcctccctttccgctgcgcgaggctccccttcagctcctgcctgttcctcctctttgcgccttgctggccggctcgtgctcattcacctccaccttgtggacgaccagccccgacggctcctgcggctccttgcaggccacctctgggtgggcttgatcgccgccccggccctcggccctctcggccttggcctttgctcccttccctttttgccgcagctctttcgcttcctcttccggtcccgctccttctctcgtcgccttttctccaaagcgcttggcctcagctccttagcattgtcctggccccgggcctcctgtatttcctcctgcagtcgcagtggttttaatgtatgggggaaagagaaccattgtacaggcctttgatgaggtcgctatcttctagtgagcgtttgccctgggacgtgactttcgaaagtgcttctcagcatccattcccccctcccctccacttaggtctgagacaggaatgctagaagggttggagttgaatgtttctcttacctcacttcagttaggcccttgtaatttcccttaagggaaggaggaccagaatgctctggacttatatcacaatggttatttttctccaccttctgccaggagcatgaagagactattctccagtattcacagtgagaacttggtgggcatcctggaggtaaaacacaaaagtgtgaagaccttctgagactgagcacccaagagttttaaactgtcaagtttgtctacactgagtctcaacaattcatgaattattacatgtttgtatgttgctaaaaatactggcttcatctgtggtcctctgaacctgggctttagtttctagaattgagaataaattgtgattatctgtctttaactgtctgtctcttttcaggacagcactttgctgtgacttcaattctgtcatggatctgagaagatttattttcagtttgtttagttttctcattgatgagaagatgggagggattatcccaaactttacttgttgaagtgaaaaccagaagttatgctaaatgttaaagtagataataagcaaaaaaaaaaaaaaaaaaaaaattagcttggatatagaacccttcttcagagaagatcaggaaaggaagaacatttatttctttctctgcaaaaatataagttttgttgttagcaaggaaacagtcaattatcaaactttagaatcttgacataaaagtgagttagcacatgtgagaatctgtaaactagacataactaactctaatgcttttctttaaagacacaaacaacatgctttctacgtgtataagtcacagtgaagaaggagcttttctttatggtatcactgttgttgcccagcccatctctgtatctcttacttgtatggtgaggaagtactcagtgacagctcaggtattccccaattctgctcttcttccacataaaaaactttgatgaagtcaaattttggtttgaaggtcttgatgaccaccctgtgggaggctgtagggtattctcaagctctctgacatctcacactcccagcctcaggtgtttcttcccttggacaccaggatccttgactctggtcttactctcccttagtcacaagtctcctcatctcatagtttcccatgacggttcttgctggacatcctcaaggatctctgtcaaactgacaataattagaggcaatctcagaattacacatgtgccaatctggattgcaacattttaattccaggtgtcaggtttccaacaatcaaggagaaaaatgaccataatccattgacaattcctctcccacactcagtcaaaaatggtccagatcacagtcctacatgctggaattatttcctctgcttctctctcaccccaccttggccaaagattttctagcaagatctgaattttaatccatctctcttcgcctgtgtgtcccgactaatttggcagaaggaattctttcttaaaaccttgccatttaattcacaaatggaaatgtgaagggtcaataggtatgtgaagaacctattcacccgtattcactgggaatcagagaagtgaaaatgaaaagaacactgagctatcatcttagatacacaaaactgtcaaacatttgaaggtggctaacaccaaatgtcaatcaggatatgaggaaagtaggaattcttctatacaagaggacagaaatctggcagtgccaaaagaaaaagtacatctatgatctgcccctccgcagatcccattcctaatacatatatcccagcgagttctgctaatctgcagaggatgtctagaaacgcattcatcacatcagtgtttataataaccaggagtaggaggcaatcaaatgtccttcacaagtggaactggtaagttaaagagacttaggttgggtttctctaaaaccaggccacaagacaaagatttgtattccagtggcttattttgatttaggagatgatttaaggaatcaccagtgcgggagtataacagtgaacccaagacaccttgagatcaataaaaaggtgcattgttggcaggctgcctgcaaagaaagggagcataatcccagtagacaacaccaggaggcagttttgtacatgcctaagagtaatcccaccttagcatgtagaacacaaggatatttagtctccagttcccatcatgtgggctgagtggtggtcccaggtgctttaatttgtagtccatctgcccaagcacaggccaaaagaaagccttcccacagagtcccgagttcatgtggcagcatgccagaggtatgtactggaacagtaggtgctaaaggcaacaattacatcatgaaaactgcacatctcactcatatgtggaatctaaaagtaatttagctcatagaagttaagagtagaatagttagagtagtagaaagttaagagttgttactggagagaaaagagggtatggaagctagaaaaaaagctagaaggaaggattttgaatgttctcatgacaaagagatgataaatgtttgaggtgacagacatgctaattaccatgatttgatctttacacaatgtctgcatgtatcagaacatcacacactaccaaataaatatatacaattgttatgtgtcaaaaaacattatatacaatgtttatattttatattaatattaatgtaaataaaaatttacacaaatcttttcattaaatatggtgtggataattatattatctgatgatacccatgccacaggctaggagaaataaaaatttacattaatgttaatgtcaaaaaagcagaaacaaagccatatgatacatgtgacacttataccacatgcatagagttatttcagacacattgtgtgttacctttgggtagagaagtgaatgagagtgaggatgagagatgaaaagaggcagaagaaaaagagaggccttataggaagtgatgaaagtgtgccataaactgagagtatgactaaaacctttcatcttcctcttctgccgcttctaagttattggttctgctgttccttgacctgtttcaagctctcaccttctatatcacacatgggaagtctggcatcagacttccagagagcaagaactaggtgaaatacaagggcacagctctcctagcctgtggcatgggtatcatcagataatataattatccacaccatttttaacaaaaagatttgcgtaagagattcacagaggcaacctgaggccctgcaactacatttcccagagatccctgaggtgatcctaactagactctggtgtcagggtgatacggaattccagtgagatcacttcccttgcagactttggaagggagagcactttattacagaccttggaagcaagaggattgcattcagcctagttcctggttgctggccaaagtaagtagaactttgtaagtaatttgcagtgtactttgaaagtggggtataaattaaaaataaaatcaagtccccctactgactgaatggatcccctcttgtcctaggcgaccccagagaaacctggaaaactaaattccaggccataatggaaagggaggtcagacacgcctcattatacacactcccttttggagttcaggcacaactgaccagcattaacattgaaacagtgatcataagactgtcaaaatggactgtttgtgggaataagataccaaattccaatctgactctggtttagcatcacatgacaatagcagaccctgaaggaaatcaatatatttaatccccaaaatatatttctttgacacatattgaaatggtcttgcaaaaccatcttttatggggaaatttgctggtttctggctctgctctgattgaggagagaataaatgagagtctgacaccttaaaaatctgaaaagagatatttaccatctgttttctctaaggctgctagctggaggtttcatctacatgacataaaccatggttcccataagcccttttaactcaagcatttaattgtactgaccgcaagtctttagacaaaacttaactcttcaacaaattgccaatcacaaaatctttgaatccacctttgtcctgtaagctctcctacttcaatatgtctgattttcaggcagagccaatgtataccttatgtgggggccataggctgttggccccctaaagcttcactaaaagtcactgtcatgtgacaggttgattaataggggaaagggagtacaaatttatttaatgtatatacatggtctattagccaggaccctttagagggccagaactaataggatagatgtatacataaagggga

SEQ ID NO: 157 - DNA, 6000 bp, Homo sapiens
gtttttataaaatatgaaaggagattctaaaggggaaaaagatactgagtgtaaaagatattgagtgacaattggggggggcatgtcctcatatctgaatatagcattcatataagccatctaagtgtcttaaatagtggataaaaatgatattggcaaggagtagagaactatttttatctatcaacattcagagggaaaagacgaaatctctaccaggaaataccacaacagtgggaggttcttgctggctggtggaaaagaatgcggagagtagatggttggtcattagtagaatttggctcatgagagagtaaaaagtcttggcttttagttcatcaatgatggtagtgccatgaactgaggataatacttattaaactcactgttacataaattatccctgttagtcacaaggggacagttattctccttttctcttttctgagacagtttcattcccattgcccaggctggagcgcaatggtgcaatcttggctcactgcagcctccgcctcccgggctcaagcaatcctcctgcctcagcctcccaagtaactgagactacaggcgcatgcgaccatgcccagctattttttgtattttttgtagagacagggtttctccatattgcccaggctggtctgaaactcctgggctcaagcaatccgccagcctcagcctcccaaagtgctgggattatgggcataagccactgcacctggccagttattctcctatagagcagaaagctaccatacggtctactagccgtcaacctcggatcttagtggataacgttaggaggccagtcacttcatccggagagtaatttactacccctgctaaacacctgacttgattctcttctctctctccttctcctcttagcttcctagaatacttgtcttctaaaaagggtccaaggttaagtcaatctgccaaggaagcaaaaagcccattgctttagctacttttccttttgactataaaggtttctctgggcaactctggtgtcccataaaatatgcatgtgtgttcaaggatgaagtgtgtgtgttgtgtgtgtggggaggctgaaaccatgttgacagaattcctgtgtctgtccagtagtggattacagtgaatggacagtgaactaagctctattagattgctgggcatcgtggctcatgcctataatcccagcactttgggaggcttgaggtgagaggagcacttgagcacaggagtttgagaccagcctgggctatatagtgataccttgtctctatgaagaaaaatttaaaaattagccaggcgtggtggcatgcacctgtagtctcaggtatttcagaggctgaggtgggaggatcacctaatcccaggaggcaaacgtgcagtgagctgagattgtgccacagcactttaatctgagcaatagagtgagactctgtctcaaaaaaaaaaatctattagattataactttcttgagggcagtatgggttttagaccttctgtcctgaaacatttaacaccatgcccggcatgtgagaaatgcacattaaatacttttcaatattaacttatcgatagggattaacttatactacacaaatagtactattaattaacactgaatttgtattacttagttgtttctctctgagcttttcaataaaggcttctggccctatctagatgtgtcagcaaaggcccagaaatgagttataagtgatacaaaactccactttttatattctttttgtcttctatataagtcagagctattataggagattcactggtgggaatcattttctcttattaaaaatgacacaagcaaaggctatattatgaaaaataacttcatgttataatgtcaaatgaatgatagctttaattccagctcctcctttttgggtctactatgctcttggcactacgttaggtgcatggtactgacagatgcatgtcagtccgaaccctcaaggggttcacaatctaataaggaaaataaattataaagtaaaactatacgggccataatagatatgaaaaacttcaccaatcagtccctaagtaatgagggagcccctatgactgaaggtttgggcagacagatattcttcctctgcactagttgtgtgagcaggatgagaagagaatcttgaaaacagcatgaatccaacatgtgggatcacataccttctccttctgcaagatttctttccagttttactgtggagtcatagaatcttatcacagtgctatggtttcaatgtgtctcccaaagttcatgtgttgacaacttaacccccaatgcaaaagtgttgagaagtgagacctttaagagaaacttctaagagggtagagccctcatgaatggattactctctattgtgtgtgctcacttgccacgggataacacggcaagaaggccctctaaagatgccagtgccatgctcttggacttaccgggctccagaaccatgagccaaataaacttctttataaatcactcagtctatggtattctgttagcagtaggagaaaatgaactaaaacacatgggaatggggccttaaaaatgatctaatcagacttcctacctgacgtttatgtctttgctactaaaaaaatggtcattggggtggtactgtgtagaccacactagattacagacaacagaaaattcgaatcctattggtctaatcagtgaagatagacctgaattcagaagttgcttgattcagagcctcaaaaatgtcaccaaagccaggcacggtggctcacgcctgtaatcccagccctttgggagcctgaggagggcagatcacttgaggtcaggaattccagaccagcctggccaacatggtgaaaccacgactctactaaaaaaataaaaaattagttgggcatggtggcgcgcacctgtaatccctgctatttgggaggctgaggcaggagaatcgcttgaacctgggaggcggaggttgcagtgagccgagatcctgccaccacactccagcctggtgacagagccagactacatctcaaaaaaaaaaaaaaaaaaagtcaccaaagatcagatctctatgcatgtttgttttcttgatgtcttctttattttaacccggctagacttgtatttggaagatggctacccaccatccaggggacccgtttttttgaggacatgcagaaagaatgggttacctctgaagcgctctcagaaaatgaaagaaaaacttttcccaacaaagaccaggaaattgctcctctcattggcccaaatatgttacgctcattgccagccaataactgtggcagggaatgggattctgctgatttaggttggaattatgctacgttgcttagattgggaccacatgcccctgtaagtaggcagagcagggatgtgactcagaactgggcttgtttaccaagataaggaagagtggatactggggagtctaggccaccataagtttcaggtacagccaatgcaaagccttggaaatccacctgacagctccggttgtaccgtccgccctccgtatctggggtttccaaattccgggattcaatcaactgaaaacaaaaaatgtagttaggcttaccaggcctgaaaatacatgaaaatatagagcctaaaatatagcctgaaaatgtactgaaaatatagagatttctttggatgattatttcctaaatacaccttaacaactattcacatagcatttgcattgtattaggttttataagtaatctagatatgatttaaagtatatggggaaacacaccatttttatgtaagagacttgaacatcttagaaaatccagagtctgggaaccaatcccacggatatagagacaactgtactaactacagtaatggcatatggtagctgaatctacctctctttccatcccagtccggaatccaaaggctccttcttgccatgttgtcctcgggcgttggctgcttcctcccatttgttactttggaagtgtcttctttcctcagtgtttcttctgcgtgggccttaccggtctttactgcactcacttacctaagaggcaaaacaatggctgccattcaagaaaatctcacttcagcccagaatcgaagaactggggcttattttgtcttctttctactctggggcttctctgaggccaagttcagaacttgtgcacaagacagtggctgtgtgacagagccacccagggctgtctccgttagatgaagagactggcttgatccattcccaagaactagtcccacgtgcagttcggttgctccgaatgggatttgggtgcgaggggctgactggagatgtggggtctgggtgagtggggtatttgagaacctgaagctcacaaggctttgtctggtttgaggtacgttttgccctttctcccgcattcggctctgcatcgaatctgaccggccgcgcctactctcggaacggccgaggaggatgggtctcccgtctccacacgcgcggtgtctgcgccgactgcagccctcctggacgggagcctctgggcccagcttagggtggcgtccagcgtgacctactcgggaatggcagccttcagtgtcctgcggcctcgggttccgggaagctcggggacctgggcagcggatccagatgcttccacagctgtgtctccgtcgctccgcttcgggggccgagaaccagcaagaccaacgcgaggaggcgccacggtacctgccaccccgctcccaggaggcccggacgaggcttcgtcggcgagcggtcggggcctgcttctcgaggtgcctgcgagcgcctcatgcccctccccaccggccccaactccgtcccgcctcacccgaccgcgggctttgtccacccgccgcggtgcggctcctcccagtccccgacagctcctccccgccccctctgccggccccacttcctaggcggcggagcgggtcggggagggaagggttaacccgcggctcttcccggcgcggagggatccggaggcgagccgagcgcggtggtgaggccgcctcagcgaaaaaaatgtccgcctgaagagacccacaagttctattcggggggaccgacagcccgccccgggaggaaggggcggccaggcccgaaagccgcctccccctcccagacccgagagctcgtgcggggcaaagtgaaccgagccgctgggcggtgcaaggggaagcccaagcccgttctcccggccaaagtgaactttaatcggggtggttggatgcggagacggggcggcaggtaattgcgggctagcgagcgggagtggggcggcgcggcggggctgggggctgcggggcgccgccgcgtccctgccggagtgggggcgcccccgtcccccgcctcaactccgcgcccctttgtacagcgcgaaacccggggtcccctccaagttggggagcggagtgggggcggaggctcgagtcgcgggcgctcaggcccgctggcggcgcgctcggcctgtgcgccccgttcggtgcccgactcgggccggcgcccaggctccggggcgcgcgggagatcgggcggcttcggccgcggagccaggctcattgttcggcaggtccggggcagggcagcaaaagtgggaggaggccgagcctggggaggaggacgccggccgagagcgagactagttgtcggggtttctgttttctgtttaaaaacgccccttggatgagctgggggtgctttccgacctcctgggcccgccggggacgtccgggcggcggcggccgcagacgcgggcctgcgagcggcgcgttccctgcaacttgtcagttctattgttgccgagcgagtgagtcacttcgcatctccgctcgccgccgctccgctcgctggacgccgaattgcccctcaccccgctcctcgagaccccagccgcggccgggcccggcgcgcggagcacccggcggcggcgcggagcagggggcgccgaggaggtggcagagactggctcggaaactt

SEQ ID NO: 158 - DNA, 6000 bp, Homo sapiens; identical to SEQ ID NO: 58

SEQ ID NO: 159 - DNA, 6000 bp, Homo sapiens
caggctggagtgcaatgccgcgaactcggctcactgcagcctccgcctcccaggttcaagcaatcctcctgcctcagcctcccgagtatctgggattacaggcgcgcgccaccacgccccgctaatttttgtatttttagtagagatggggtttcgccatgttggccaggctggtctggaactcctgaccttaggtgatctacccaccttggcctcccaaagtgctgggattacaggcgtgagccaccgcgcccggctccccggtttattttatcttatgtaaaaatgcagattcattgagctagatgaatgcataagtgactatttctctacccccctcacatgtgaaggttgatcaaagactcagaagaatgcaaccgtttgcctcttatctacccacatctttttaaaatttattcatctttccccaatatctgccccttcccctataaaaactgaagccctcaaaatcatctttggagaaaggcacggacctgtctccaaagatgatgcacgtccttaaacttggcaaaattaacttctaaattaattgagatccgtttcatatacttttcggtttgcagtatcagcatttagaaaggctctcctagaagattctaaggattgcttcttggccatttggctaagatcaagtttaggagattctaagaagccccctctgtgctaagtaaagaactactgagctaggactagaccaacttagtaaaattgctgcgctcagtgatgcacgcctcccatctgctcaggaggcttcggcagaaagatcacttgagcctgggaattcaaggctacaaatgtgctatgattacacctctgaatagccactgcactccagcctgggcaacataccaagaccacgtctctaaaaaaccaaaacgaaacaaaaaaaaaaaaaaaagaaaaacaaacacaaatcagggcactgacatgtacagttgtttcttgaaactgatggactgacaagacagcaatatgattggtggatcagacaaagttaccaacctaatagaacaacaagtcctaaggtcaagattaattgttatgtaacaaatcctggctgtccactggatattgctttcaaaataagagtccatagagggcagaggggatagatagtaatataaaaggtatttgttaataccgaaaagactgagaaaaaacacttccctttccaatgtgaaggactaaataatccaaacttttcccactataaaacacagacttttctaagtcattggatgtggggctctggggtagcctgagctgtttgtcccacaccaagatgcttcaaaacattattaaaaatgtttggatccccatgaagccctattataaccaagtttatcaggagatttgagtaggaatggggttaatgagcctcatcatttataaaatcaggagtactgataaaataagtaaaatattgaaagcttctccacctgcttatggtcatcactaaccagcttcacttagcatgcacatgaaatgaaacattagtcgacctgtgaatttaagcaagctatgttagaaaggaacctggaaaatcactgtacacttatataagtaccacttactttgtggcatgaataagtataccaaaaaaaaacacccagaaatgccagataaaatacaataaatatcattttaagctgggtgtggtggtacgagactgtaatcccatctacttgaggagctgaggcagaaaggctgcttgagtccaggagttcaaggctgcagtgagctacgattatgcctgtgaatagccactgcactccagcctggacagcatagtgagaccttttctgttaatacaaaaagacaaaaagcagcgaggcacagtggctcatgcctgtaatcccagcactttgggaggccaaaatgggaggattgattgagcccaagaattcaagaccaacctgggcaacatagctccctatctctaaaaaaaaagaagaaaaaacaagaaaaatctttttaaatgggtggatgccaggcatgggggctcacacctgtaatcccagcactttgggaggctgaggtgggaggatcacttgaggccaggtgtttgagaccagcctggcaacatagggagacctctgtctctacaaaaaatttaacaatgagccaagtgtggtggcccactcctgtagtcccagctactcggaaggctgagacgggaggatcccctgagcccaggagtctgaggttgtagtgaactgactgcaccactgtactccaatgtgggcaacagagtgagaccctgtctcaataaaatagaatacaataaatgcatggaatatggaggagggaaggtttttcttttaatcttatacccaattatagtttgtatgttttgtttttgcttcttttttttttttaagacagaatctcactctgttgcccaggttggagtgcagtggtgtgatctcagctcactacaacctccacctcctgggttcaagcgattcttgcacctcagcctcctgagtagctgggattacagctgcccacaaccacgcctggctaatttttgtatttttagtagagacagggtttcaccatgttggccaggctggtcttgaactcctgacctcaggtgacccacccacctcagcctcctaaagtgctgggattacaggcatgagccaccgggcctggctagtttgtatgttttgattttgtgtatatattagttttatttttgctaaggcatgtttttaatttttgttattgtgctttgttttcattttcattatttattttgagtaagttatacttaaaacaaaaatcaagattcaaaaagtataaaaggggccaggcatggtggttcacacctgtaatcccagcactttggaaggccaaggtggacaaatcgcctgagctcaggagttcgagaccaaccttggcaacatggcaaaaccccgtctctacaagaaatacaaaaattagccaatgttgtggcatgtacctgtggtcccagctactcaggagggtgaggtggaaggatcacctgagcccgggaggcagaagctgcagtgagccaagatactgccactgcactccaatctgggcaacaacaacatcctgtgtccaaaaacgtataacaggtcaaaccgtaaaacttgtctctcttacccttattcccagcctctcggttcttcttccctatccttccaaagatgttttatgtaaatacaatcaaatatacacatgcatactcttatcccccttgttaacacaaatttttgttttctttattatttctttcaatagaggtggggttttgctatgttggctaggttggtcttgaactcctggcctcaagcaatcctcctgtctcggcctcccaaagtgctaggttcatgagcatgagccaccagacccggccaaattttagctttctttacacactattctgcattttgacttgtttcatataccaatagattttgaagattgtttcatatcaatgcataaacagtttcctgtgttttgttatagctgcatagtattcagattattgatgtaccttttttttttttttaagtagagataggggcttgctatatttcccaggctggtttcaaactcctggcttccagggacctacctgccttggccttccaaagtgttggaataatagggtgagccaccacacacagccccataatttatttaaccaaccctctattgatggatattgagactgtgatatagtttgggtgttggatccctccaaatctcacgttgaaatatgattcccaatgttggaggtgggccctgttgggaggtgactggatcatggggacagatcccttgtgaatggtttagcaccatccccttggcgataaactgggacctccccacctaattttcttgttcctattctcgccatgtgacatgctggatccctgtcaccttcagccatgattgtaagcttcctgaggcctcaccagaagcacatgacagcaccatgtgcttccagtcttttgctattataaacaatgctgcaatgtacagccatgaacacgtgtcatttcacagctgtgtggatttatctgtaggttaaatttctaaaattggaatttctggggcaatgagcttgtgcatttataattttgatataaattaccagttgcttttcatttaaagacattcacatcagcaatgtgagagtgctttgtatatactgtgtttaagagaataatttttttttttgggacgcagtttcgctcattgcccagcctggagtgcagtggcgcgatctcagctcactgaacctgtgccttccgagttcaagtgattctcctgcctcagcctcccaagtagctgggattacaggcgcccgccaccacgcccagctaatttttttgaatgtttaacagagacagggtttcgtcatggtgaaaccctgcctctactaaaaatacaaaaaaaattagttgggcgtggtggcgcgtccctgtaatcccagctacttgggaggttgaggcaggagaatcgcttgaacccggaggcggaggttacagtgagccaagatcaaggcacagcactccaacctgggcgacacagcgagactccgtctcaaaaaaaaaaaaaaaaaaaaaaagtgaggcgcaaatgggaggtgaagcagtgaggttcgcaagtgtagacacgctcaagggactcattaaatgtcatttcatttaaaaaatgaaattgagcatatgtgcaagcaaggttcacacaccccatttaatcttcacaccaccacggggtagtcactattatccccattttacaggattaaaacactgacgctgggaggttgacagagttacaccaaatcacacagaggagctgggcttcccccgacctcctccgctcaagtctccctgtccccgggaggtgcggaaggaggcaacagacgcttggcccataggtggagcaattggcgaaggcttcgcccgacgccggaactgcgagctctcagcgggagccgagacggtgcagggccggagaagcaccttcactcccagcctgcgccccgatgctgcgcgttctgtgcctcctgcgcccctggaggccccttcgggcccgcggctgcgcttccgacggggcggccgggggctcagagatccaagtgcgcgccctggcgggtccggaccaaggtaaatgtgcagttccggggcggcgcatgacgcgactgggactaggccggaggcagcgggggaccggcaggtgggccgctcagtgcgttgaaggattcgatccccagtccctccctcccagttctaggcgccccaaaccgctccaggcctgagaggtgggcggccgccttagtggctccagactctagctgggggcggggggcctctggcaacctcggtctcttcaaaggccctttggggtcttccgactgtgtggaagggggagcggggtccgcacgggtaggactgggccccgcggcccccaggccaggagcgtttaagtgcgcgttcccctcccccgccaagggtcctggcccggttcgggggcggaggcagcggagccagtcccagtgcccagtgcggcagcgggcagagtgaggagggtgcctctccagccgcgcgcccgccctgggccgctagcgaacctttgcgtccttctggctccagggaaaagttcgctgtttctccgccttttggccaagatcaaggatagtatggagcggggacgaggggtggggggcaaagttcgcgggtcactggcagaaaacgcctctgatcgcgtgttgcgtttttgttgttgttgttgtttgaacttctggagcattcagtggtgctgataacgctcctcagtcctctgctggtaaccatcagggctaggcgcttctcctgccttgggtctcctccccgcatctcatcccctgtctcctgcatttgatacacagatggcattgtactgtacatttcgttgtattgcttcttttttttttttaacaaaagtttattctta

SEQ ID NO: 160 - DNA, 6000 bp, Homo sapiens
agaaaatacgctttgacaaagatgaataagggttaactaaagagatctaattaaaagtctaatatatatactggaagatcgatattagaaatctaacattttattaaattcactaaggaaaaacaatgataaaacacagcataaaaacaaataggtgttcccttacaaaaactgaaattaagaatattttcctgattcataattacacagacctaacttaaaaaattaatattggagaggtagattatgaacagctctcattatgaaaatgatttatatagtgttttgggaagaaaccttaagttgtgataacacagggttaggaatatgaccctttatatttaattttcctctaggaatattaataagatctctaataatagttctcattttagagtttagaagtcggattattatagggcaaaccagcctcaactattctagatttaagaggtaaaactgagaacattaaggaatctcagtcgttcagataatgccaaataaacacctaaaggatataatgccctgagtccatagctctatttgtctctgaaactccatctcctttgaaaagaatctagacatatttcattctggggctttgacctgtggttttctttaattgaagtctcatagtcattaattgaatcatgtgatgattttttttttctcttctctaaccttcatcttgtgttcaaactaagatttcatttatgagcaggaggtaataatgggttctgccaacacgtgaagctatccttagcaaagagaaacaactccgtttaataatgatgttaaataattattgctaagctatgtgttgcgactacaacatgactttgaaatgactacggtatgattagaataagaatatgatataactgtggtgcttatgaaatgaactggaaagtggctgtgctgctatgtttattgtaaatgtatcacaatgatggttcatttatttaaaaacagtgcagtgcataaaataggtgacaattggaacaatgtactagctttaattgtagattttgtgaatggcaaaatgatcgtttactgtggtaagataaaagaatcatcctttcattcactgacattattctgtgaggcaatatttttcttttcactttgggatacttgtaagtcctttctattcttgaattttatatattctaatcatacaaaatattactataataaaagttgctttgctatttaaaaaatatcagtctattatctgcaaggaaagtattttatattttacatataagggattaatggattttacagtgggcttttagacactgcagttgaactgtgaatattaactcagaaaagtttgaattaaaaagagcttacaatttcatgttggaaaattgtgatgtcaaattagttggttaaatcatgtcattatttattcaatatatggcttagtaagcttgattggtgtttttttttttttttacttttcatttaaacgtctaaaaacaaatgttacttaaaaaagaaaaaaagcaaacaaaactattgtactcaaaaacaaggggtaatctccaacacgccctcagtcaagagcttaagtatgtcaagagcctttaatgcctaggcagcccattatagaatggggaacacacaggtttaaaataaatgccctttattcttcctgtaagttagaccaagttattcaatcatgtactaagaccttctctgacaacctttataggtcattcagaaaataaatttttgttccaagtgaactgttcctatgttaatgcttcaaactttactcaggtatcaggcgttaagtacaagccattacacaaacctttgtggtttactgactttgaaagatcaatcaaatatattactagatagtgctttgggggtcagtatttgagaaataaagctgtattttttggggagtcattccatccagttcccgtatgaaaacgagaaacttgtgaggatttagtacagagctggagtcggagaaatgaaatgcacgggaaaagacgaaaatcacaggaaagaaagttggaatcagcagaaagtgcctaggggaaaggaagtgttccacagcttgggaaacagctgcctgggactccttccagcccctcggaagcaaagttcgcagtgaggtgggctggaagcgggttttgcagcagccgcgagtccgggctcaggtttccaggcgcggctggagcagaagtgcagggaccgccacgatccaccgccgcggccggtcccgctccgctagaggagacttcgcacgcgcagccgactggcccgggctgaccgaggggacccagacgctgccactttctctttccaaggcagtttccgtggctctgcatgtaggaagtgctccgattaattttctttccggtctccgcagagattccaaattctgcggtccccacctttcgctgtactccctctccgcccttctttccaatgtccctgccagcaaaagcctctatttgcagcaccgggcatgttgtccgtttaacgcgctccggggatctgctggctcgtgctcccaacccaggggtggctatacgtctcgcgcctctgttcctgggtagactcccccatctgtgcattttggccccttcacttagcaaagagatgtgcgaagtgtgcgcctggagacgagccgcctcggtgacccccatccgcccgcagcggtggccctggttccccggatccgcgcccgcgccctgcgggtctcccgcgccgcccttgcccgccggaccacccgggctcagagggtcgctcgctttcagcgcctgcgagcgccgcttccgcccgggcctggggagcgccagcgcgtccctcccacgccggaccctgcagagcatgctcagtgcacctcatggaacccggctctcctggggccaggatcagatttccgggttttcgctgctgccgagggggcgcggaggaggggaggctgggagacagtcagcgccttgttccgcgctccctccctcgcgccgggctgcggccgcccgcgccgcaagatgcaggccaatcagagcccgggggcggggcctgggcagtcacgccctccctctgggcttattgagagttatatcaagaaattcagttcagagagaggagagggagaaggagagaggggcagaggggaagggagagagggagagcacgcgagacggaaaggagcgcctcagagtctctgaagcacgcaagagataaccgattaggaatttttcgggcaactgtcacccggatagctgtcagagaatcatcatcaccgcaactctgacgtttcctacaagaagttagagacttaagcagtattggcatcggatggaaatggtatgcatgctgctgtggaaaatatccctgagctgaagaagtgcaactatgtgttgtgtgtgctaaatgcccagaagaacccagacccagtgggtaagagagacgaaatgtggagagaatgactaacgacaaatccgtgaatttgttctctggagttgctaatttgccagcccgaagcaacacattttacaaggaggaaacattttgctgcttctgatttctccccaaactggtgctaccagatgcatggctttctatgtgttggaacaaatcattcctaactgcagcatactgggaaaggggaaaggttgaggcaactaacgtaagtgtaaagtttcgcatgcacaattgtaaattctgtgtttagatgtgtcctcagtgtaggcgaaagatgcttgtaattgggtagacggttggggcagagctcacctactcggctgtatctgcatccctacctgcatcactctgccggaactaatcgcgggcatcagctactgtgcagcctaatgcagataagattagagcctgagaactgaccagtcctactcaagtaggtagctgcctggagccttgcacccatttaaactgcagttatctaagcagaagcctttttacctgcatgattgggttgcagtatttatgtgtggcaaatgttactaatattctaaccagagatcaggattaagaaattgcattttttttctcttttatgttcagtagaaaatattgtgatgttacatgggaatgttagctgcgtttcacttatatctcggcactctcttccacctctaggaaaatgaatcctatattattatacatttttaaaagttttaatgtgtttatgaatcctaatgaggataatttgtcaatatggagaaaggagagcaagctgtgggcaagaaatctgaagtcttgttgttgtgcttttaggcaatgaggatgtgtagaggccggtgactattgcttctgatgccgctgcagcggcatgtccggatgctcgtttcccagtaagattgtattagaaggcagttgaagaactgggaggaaagaaaaagatagcctttttagaaaagataggtgactcagtggggcagagaagaaaacacatttgacatgtgacaaagcaattagcaggaaccgtagctaaatacttagtgtttttcacttgcacctgaaaagactgagggaggtaggttagaggctaggaggagggtgagacagggggaggggaagaggagaacaagaatgcatgttttgaattaaacagtattctgaaaaacaacgtgcgtgaatataggtaaaaatagcagctgtccttaattcaaaagtagaaaattttattttctcccggcaaatgcaaccagcaggagatatttagtgtttttctccacagagtaaacttgcaaacagtggcagagcaaactgccatgtttactaatgttcaggggaaaatgtgtggtgatattttgtgacggtgtgtttttatttactgaagaataatattgtctatacaattgtgttgacagcggctgtctccaaataagtgatgagatataatgcatcctccagtccatgcacgcttcctcttgcaatttgtgcatcattcctcagtggaaacctttaaaccctaaaatccaggaaaagaaaataaatacattatcatggacctgagggatttttacctgttggctgctctgattgcctgtttaaggctggattccgcaatagctcaagaacttatttacactattagagaggaattgcctgaaaatgtgcccataggaaacataccaaaggatctgaacatttctcacatcaatgctgccacagggaccagcgccagccttgtctacagactggtttctaaagctggggatgcccctttggtgaaagtttccagcagcactggggaaattttcacaacctccaacagaatagacagagaaaaactctgtgctggcgcctcatatgctgaggagaatgagtgtttctttgaacttgaggtggtgatcctccccaatgatttcttcaggctgatcaaaataaaaataattgtcaaggataccaatgataatgcccccatgtttccatctcctgtcatcaatatttccattccagaaaacactttgatcaacagccgctttccaattccatcagcaacagatcctgacacaggcttcaatggtgtacagcattatgaattgttaaatgggcagagtgtttttggactggatatcgtggaaactccagagggagagaagtggccacaactgattgttcagcaaaacttggatagagaacagaaagatacctatgtgatgaaaatcaaagtagaggatggaggcactccacagaaatccagtacggccatactgcaggtcacagtaagtgatgtaaatgacaacaggccagtgtttaaagagggtcaagtggaggtgcatattccagagaatgctcccgtaggtacctctgtaattcagctccatgccactgatgcagatataggcagtaatgctgaaatccggtacatttttggtgcccaggtcgcccctgcaaccaaaagactctttgctttaaataatactactgggctgattacagttcagaggtccttagatagagaggagacagccattcacaaagtgacagtgctggctagtg

SEQ ID NO: 161 - DNA, 6000 bp, Homo sapiens
ccatattggccaggctggtctcgaactcctgacctcaggtgatccacccgcctcggcctcccaaagtgctgggattacaggcatgagccaccgtgcccagcctgtgctgtgattcttgaagctgcaacccatgtgcatgcaagtgaatttcagcttccagtcctgtccatagctgtacctaagtgtggaagctggatgtgcatgtatgcatgtccatgaccttgtatagccacatctgggactcatactgcacactgaatttggctgacatgtccagactctggggccaaggctgggtcacacatactgagtggccacatgcgtttgacgtctgtgacaatttggtgaccgtgaatgactggtttcaagtgaccacctgtctgaacctgtatccagtgcccctgtctccacccccaaccacagaggacttcttgccctctggtctgttccccttcctctctctcccagagtcttatagcaaatggggtgggggctagagttctggagaaaacaggcagcggttgtaaataaacaacagggcaggcggagcatggtggctcacacctgtaatcccagcactttgggaggctgaggcgggcagagcatttgaagtcagaagtttgagactaccctggctaacatggtgagacctcgtctctactaaaaatacaaaaattagccaggtgtggtggcgggcacctcagctactcgggaggctgaggcaggaggatcacttgaacccaggaggcggaagttgcagtgagctgagatcatgccactgcactccagcctgggcaaaagagtgagactccgtctcaaaaacaacaacaacaacaaacaaaaacagggcagggtgtcttgagaagttaggggaaaggcataggcatatagtagttagggcagggtgcaaggaaggtgtaggaggcaatgtaaacgtccctgtcctcaggcatcctctaccccttctcttagcagcccaggatggtgacaagttgctggaaggtgacgagtgtgcaccccactcccagccatggcaagtggctctctacgagcgtggacgctttaactgtggcgcttccctcatctccccacactgggtgctgtctgcggcccactgccaaagccggtatgaaggcaggggctcagggtcctgagggagcctggttcggggggaagagctcctagatttgggggaagacggaggcagacgccagaactcctgggttctgaaagacgaggaggccggatgtcaagcccctgggttaggaaggagtgtgtgtttcaaagccttcgatctctgaaggaggaaggagaagactagttccagcttttgagcctcagttctagggatgtgagaatcctggattcggggacagaccaggagggggctgggagtagttggaggggatcgagttctaggagtgtgcctgacttcagactcgttggtccttgaggagcaggggctggaaccattggcttcagggtcttgggaaaaggtaatgggatgtcgagatttctaaagggtcgggagacctcgggttgcccactctttgatctttctgtcctctacttgcgggtaaccactggcccgcactccactggcgggaaaaccactcgcccgcacagcttcatgagagtgcgcctgggagagcacaacctgcgcaagcgcgatggcccagagcaactacggaccacgtctcgggtcattccacacccgcgctacgaagcgcgcagccaccgcaacgacatcatgttgctgcgcctagtccagcccgcacgcctgaacccccaggtgcgccccgcggtgctacccacgcgttgcccccacccgggggaggcctgtgtggtgtctggctggggcctggtgtcccacaacgagcctgggaccgctgggagcccccggtcacaaggtgcgtgaaaggatggagctggatgcgaggcctcaaggaatcctatgctccagggctcttgggcggaggggacaagggccggaatttatggatctgctccaagtccactgtcttccccagtgagtctcccagatacgttgcattgtgccaacatcagcattatctcggacacatcttgtgacaagagctacccagggcgcctgacaaacaccatggtgtgtgcaggcgcggagggcagaggcgcagaatcctgtgaggtcagagcctagaggggccatcaggcggaagaagagggatggggacaggtgtgggagtccggatggggttggattttctttgctttgggccagagaagatgctagggttaggcttggagatggagtaggaagagaagttagaataggggtgaggttggagttggggttataggtggggattgcgttgtttgaggtggataatgtgatagttagtttgagatggcatgggttggggttgagaatgggaatggtttggtttgattctgggtgggaaatacgtcagggttgaattgggatgaggtagattttgtttggaatgcagaagacatgaagattgagattggattttgagatgggcatgggtttgatttgattttgaatggtgaggatgtgggctgagttggatttaacttagtacagttgcactggagttgcatgggggtgagattggatataggttgggtgagttgtattgagctgtgttgaattggggttggggttggggttgggttggctctgtttgggataaactgggctgtattgagttgagttgggttggggttccctgggatggggatggattgggtttggggtgagattgcaaatggtgattaggatgaggatgaatccaggaggtttcactcaacctgagaccccctcttttccccacagggtgactctgggggacccctggtctgtgggggcatcctgcagggcattgtgtcctggggtgacgtcccttgtgacaacaccaccaagcctggtgtctataccaaagtctgccactacttggagtggatcagggaaaccatgaagaggaactgactattctagcctatctcctgtgcccctgactgagcagaagcccccacagctggccagcagccccgcctgacatggaacagaacggagccatcccccaagaccctgtccaaggcccagatgttagccaaggacttgtcccacctgaggacaaagctggcgctcaaggtcacctgtttaatgccaagataacaaagcgctgatccaagttgctctgtaggaatttctgtgacttttttctggggtcaaagagaaaccccgagacactgtacactgttccttttcacccaccaccccgatccctaggtgaggagaagcggcttgaagcagggctccattcattcaacacacatgaccacccgtgtgatcttgaacaagaggcccaatctcacttcgccttggtttccttatctgtaaaatgagaccatcttattgctgacttcaaagggctgttgtgaggattaaatgagatgattcgtctgaactgattaaaatcgtgtctggcactgagtaaataccctctatctctggatcccagttaaaggacctaacagacactagattaccaagaatggctttttctttaaggtttagttctgggccgggcatggtggctcacacctgtaatcccagcactttgggaggccaaggcgggcggctcacttgaggtcaggagtgcaagaccagcctggccaacatggtgaaaccccatctctactaaaaatactaaaaaaatttagccgggcgtggtggcacacgactgtaatcctagctacttgggagggtgatgtgggaggatcgcttgaacttaggaggcaggagttgcagtgagccgagatcgcgccactgcactccagcctggtgacagagcaagactccatctcagaaaaaaaaaaaaaaaaaaaaagatttagttctgggcttcctggtagccatggcaaaaaggcaaatactgtcctttccttagccaggtccctgatatacagcagaggctggaactctgagctgctttgattttaccaaaaagccaagacaacctgttggaagcctatgggtttaccattgaggctgcaggaatctagttcctaattatcttcagagaccacaaaatgtgatgttcaaggtcgctgaatgttgaagtacatgaacctggctcgtgagacctaaatattgtactggtggtgggggggaagggtcattggaatctgtggttagcctgatcttgacctgggagggaaggttgtccagatctctgggactttggaggacaggacgttgagcacccataactgggagcaagaagtgggaggctcattgagaccccagcattgtttgggagggacactggattttgtaatgctaaagaacttaccctgggagacccctgaaacttcacattcctggatctggaggcactaggaatgtggtgatgtgtaccccaaaattttattatgaaaggaacagtagctttggggacctaggtcctgggtctgggagtgcaagaaccagggcattctgaaggccaaggcttatatttcagggggaactggcagctgagatgctagtatcttggctccgagtggtgcagggaatcagagccctaactgctggtgtttgagggcaccaggtctgggggtgcagggccttaattgagactgaggtatatggggctttgtaccaggggtcactgattcctccgtcttcctgtttctgcttcccctcagtccccccttgcctcactggctgctccccagagcaaagccccagagccacaggccctgccccacctggcttcaaccccaggaatgcgtccagcgtgatccagggcctgcagaacaggtgctggttctccctccccgtctacagctctggggatcggagggggggggggcaattgtccagcccccaggcaacaggggaagggccttggccaacatctgggtgccagcagggcaggggtggggctctgaggggataagggcttttaaaagcctccccagggaggttccccagttcctccacctgctggcccctggacacctctgtcaccatgtggttcctggttctgtgcctcgccctgtccctgggggggactggtgagacagtggggggatgtgggagggggaacgggccctgattctcttgctggcctcacatccccccccgataagaccttcccctccaacaccccaccctcatccctctggcccacagtctatcctagtccggggtgccccggctcttatctatcttgcgcggccccaccctaaacttccacccccgctcctccatgttgtcatagtgctcactcccacaccagattcctgctcctcccaggaagcctcagtactttctcctcttccctagccaacgccctgtcccaccgctttaccaaaggggcagattctgggccatctctgtctctctctggaggaccccaaccctcccatgggcttcccccaccccacaggactctgatcatcccctcctgccccctagttccctgcggccacctatttggctcctgagtctacaaatcccaccacactccagtgactttttccatccagctgtccgctctcaactgtgtcctccagaccctgacatctggtctccccagtccttccagggtcccccaaatttcaccagaaaaccctgcttcccaaactggcatgtgggatcccccatctggtatgggggggggtctgcaaatgtcccttcccacccagcacccccagctctcccaggaaaaacaccacaccctcccaccacatgctcctttccttggggaagttccatcccgccccaggccccagcccttctctgcctgaattgttcctacacagctctggttttctggaaccccaccccaaggatcctgaatgccttctcagccagcgcttctgccctggcctcccccaagtcagtatgtgattctacaacctcacgtcaagtgggtcctgcattgcattcccacagctgcttggcgcctgttctcaccacttctccaa

SEQ ID NO: 162 - DNA, 6000 bp, Homo sapiens
gccttctccaggtccccgaagagttggcactgtcacaatgacaatggctaaccttttgtcttccaggctactcaacccttttggagaaggtggcaacatcgttggcactgtcatcttagacaaaagagagtgggactggcagaagatcagctatctcaaaattggaaagcaggtcactagttcctatccactgtgattcgtctggcattcttcagtcctctgtactgtggcttctcctttcccccatgattttcattaaacatctacacaaaaattatttaatatgtgcaaaatgtataaataactaatcctgcccttcaccatatccatgatcctgcattttgtgtgtttcctttctttgttttcctctatggtttcactacatgtgaatccctagtgatagatttatttttgcttgtttcttaactaacagaaatgggatcacactgtatgtattctcccgaaacttgctttattctctcaacattaagttcataaatttcacctatttgttttttgtcttaatctttgtaaccagtctgtaaaaccaaatgactatcctctctgttctggcacaatgtgctgtgcatatcaggtgaccagtaaacactgtaggatgatgctgggcaggatatgtccacagtgttgggagaaaagctgagtgttgggagagaacctgaggcagggcttggaacatgtcaggggtccagggtctaaaacccctcgtggcctttggaatgggtctagacttgcgggctccttgcttttagcactcccattatctcaagtagccatatgtttcaaagaaaatgctaaactctcacagctatagctcattcgcttgatacgccacttccttccaacccccacatcctcaccacctgtttctttgttttatcaccaataaatagcgtgggctcccagagctcagggcctttgcagcctccatactagcgttggccccctggtcccactttctctcttgtcttttctcattcctttgactctgctggacttcgtagcacccacagcttagtgttgggtctgatcaccccaacacacagaataggtgggtagctcacgttcatgcaaatgtagttgtaatattcaggaataagagtttccagagaaggtacaaaacttttacgtgacccccaaaaaatttaaaaaaaagaaaaaaaaacaaaaaacttttaggtggctaggcgtggtggctcttgcctataatcccagcactttgagaggccaaggcaggaagattgcctgagacctggagttcaagatcagcctgagcaacgtagcaagaccctgtttctaccaaaaaaaaaccttttttaaaataaactaaaaacttttaggcaactgctaaaaatgaatcatttggtgtaaagggacctttacaaaatcatttaagagcagggacctctcttaaaggcctgtggatctcccaagcatggaaataacagaaaatcttgagttccttcaagggaaattccaggcaccttcccagcctttagaagtaaatgagcaaattaataagcaagaaggtaatagtagcttaaaacaatagccaaggccgggcacagtggctcacgcctgtaatcccagcactctgggaggctgaggcaggcagatcacttgagctcaggagttcgagaccagcctgggcaacatggcaaaatcccgtctctacaaaaaatacaaaaattagcattgtgacatgtacctgtagtcccaactacttgagaggctgagggagaggatcacttgagctgggaggcagaggttgcagtgagctgagattgtgccactgcactccagcctggatgacagagcaagactctacctcaaaataaaaaaaaaaaatcaaaaataaaaagccaaggaagttagagtcagaagatggtccctatagaaactaatgatgcatcttaactatgtccctgagttgttttttaaaaacccagaccctcacgaaatgtatccactggcatatagacctcagataaggaggaactgaggattgaactctgaccactgttcttcaacgtctttcagaggggcctgaaagtcatgtctgcaaatcagaactaacattctttttttttcttttattttttctttttggagacagtgtatcactctgttgcccaggctggagtgcagtggcacaatcatggctcactgcaacctccaccttccaggcccaagcaatcctcccacctcagtctcccaagtagctagaaccacaggtctgtgccagcatggtcagctaatttttaaattatttttgtagagatggggtctccctatactgcccaggctgagaactaacgttcttttctactgaccccaaatttttagacaaagctttgtctaaagttccttaaccaattgcaaaaaagaaaatctctgattcacctatgacctgtgggtccccctcccccactttgagatgtcctgcttttttaggtcaaaccaatgtgtagctccatgtattgatttatgactttgcctgtaacctctgccccacgcacctttattttactttttatttttgagacagggtcttgctctttcattcaggctggagtgcagtggcacaattacagttcactgcaacctcgacctcctaggctcaagtaatcccctcatctcagcctattccgactagctgggacacccagctaattttaattttttgtagagacacggtatgtgttatccagcctggtcttgaactcctgagctcaagcaatcttcccaccccggcctcccaaagtgttgagattacaggtgtgagccaccgcgcctggcccccagctgcctttaaaaacccttacttgccagccatcaaggaggagctacctgattctccttgcttggtaccctacagataaacacccttctttctccctctgcaaaccttggtgtgggtatttggccttactgtgtcaggtgaagggaccctagttcagttagataacataaatatttgcagtgtatgtgtactacccaaggacatgacttcattattcaatttgacaaatgcgttctgttacacaaatacagaaaggattaataaagctttactagtccatctttcccattatccctgcatgtatccttgcattagtgcaaataattgagaacaaaccattggtgaggggatggaaagactgctctgactcaccagctccctttaagtatttccttaagtaaatatcataagtaacacaaataaatatttcatacaatgtagagaaaaaagcaaaaataacagttctctgagcatcaaactaataggcttagtattactatcatttttttgaaacggagtgtcgctcttgtcgcccaggcaagatctcggctcactgcaacctccgcctcccaggttcaagagattctcctgtctcagcctcctgagtagctgggattacaggcatctgccaccatgcctggctaattttttgtattttcagtagagacggggttttgccaagttgggcagactagtctccatctcctgacctcaggtgaactgcctgcctcgacctcctgaagtgctggggttataggcgtgagccacggcacccggcctaggcttagttttttgtaggtactagagtatttgtttctttagccagaatccactgatattttagtcttctggttctcaatcttggcttgcttttgcaactacctcttgaactttaaaaaattctgctccagcctgggcaacagaaggagactgtctcaaaaaatatatgtcaataagtaaatatcctgatgcctggatcccaccatgggacattctgatgtaactggcctgcaatggtgtctgggcatggggatttttaaaagccccagtgactaatatgcagcagagtttgagaaccactggtttaaaggactttgtcctactctgacagcgtctagcacagtgcctggcagagactgatgctcagaatgaacaaactaagattctatttgtcaaggaggagagcattgtgttactcacaaatgcaaacaaaccacaagcaagggataagtcaggccctgggcaaagacaatggtaaagcaattcctgccaagtaagcgtgtgagggtgacacccactgaatgcaagctgttgttacctttttccctttatttttatgtatttattttttgttgagacagggtctcactgtccttcagtctggagtgcagtggccctatcctggctcactgaagcctcgacctcctgggcacatgcaattctcccgcctcagcctcctgagtagctaggactataggtgcgtgccaccatgcttggctaattttttaaatttttgtacagaggggtggggggtcctaattatgttgctcaggctggtctcgaactcctgggctcaagtgatcttcctgactcggcctccaaaagtgctgggattacaggtgtgagccactgcaccaggtcaagtttctatcttgactctaactagaaaaggtgtcatccttgaaatgcaggtactgttcagccaaattccaaagtcctctgaagatccaagttctctaagaagttcagaggtgccaggctgtgtcttgtttgtgcaaatgaaacagaggatgacaaggtcgggtgggcatttcgagctctgccccaagtctggtcggcttgagagtcaacctaggagcctctctcggctccaaatggcaatgtggcagcccttcccgagtagggaaaaaggagcgtgtagggggcaccacggcaagctggttgggtctgctccacccatgaggatggagtgcagcctccaccgggaaccaggggcgcgagtcgctgctcagtggcctgggcctgcatgtggcgcggcgggagctgctgcctagggccgcgcagcgacggggggtgaggactacatgtcccgacgtgcctcgggcagggcggggcggtgccggagccgggcctggaggccggccggggccaggcgtgcgcagtggttcttgggagtggcgaagcgggtcctgccccgctgtcagctgcggcccccggcgccgggcgggggtggccgcgaccattggcggagaggcgaaaggggcggggccgccgccagccgctgcgggcaaggctgaacaggcggaggtgggcagccggccagggaagcacggtccaggcggctacattcggcccggccatggcagcggcgcccctgaaagtgtgcatcgtgggctcggggaactggtgagcggcggcgggctggaggccggggctccgcttccaggaagcgcctctcccgggcggtgagggctgcgcgccccatgctgcggcgtgggcaccgggcactgcgcgcagggaggcggggtgggcgacctcgttgctgggctgggcaccgtgcgcccgaggaggccgcaccggggcactcgctcgggaggcgctgggctcgcgtgcgtgcgggggacagcgcggagagagggcaccccgagcacgcgggcacctgtctgcgcccccgttactgagcgcacagaagccacctgcttgccacgcctgggtgttttgcacaatatcctaagggcgtattccgttctccacggcggatctcctgggtcaaggacttggtggaggctcgagcattcttactgcagtttcggtgttgaggaaaccgaggcggagagggctaaagggctcttgctgcccaggtcacgggcggggcatgctctgcccttcaaggtgcccgtctcgcccccgcttctgataggtccactatcttaggcgcgtcgtatcaggaagaaaatccaagtttcaacaggccgctctccctgaggcgttgagaattctcccttgccgagatgtttgcgaagctttgcgtctctttggggccttatttgactttaacattttatagagcacattagaaatgtcagttcttctagtacccttaatcaaacgtacactgtgggattctctggtgtgtttgggtgaatgtagaggtgggggtgtgaagggggaaggaagca

SEQ ID NO: 163 - DNA, 6000 bp, Homo sapiens
gaggcctttgggcctctctgtttcctgtttcagtacttgccccatttcgtctagaaaactcctacttgtccttaagacctagctcctcataatggcttcctctaagtcaaaattgaacgcctgtctgtgctacaaagagtactttattcatggcatttatgacatggaatttacaattactgagttgcaatgactttccccagggaaaagtccatttctgaataaaaatcaatcaaattcggtgtgtggtacaccggtgtacagtgtctggtacattatagacattcaataaatactgctaaatgaataatgtgtattgtttatagtttacaaggtcttttcacatacttaacttattttcatcatattatcatatcacataagcataagagtttggatacaagaagctgttgttattactattattattaaactgagacttagtaaacatttctagcattttccccacctgcagaactttaaaaatacacaaaaattaccaatatgggacagtaaactagttcaaccattgtggaagtcagtgtggtgattcctcagggatctagaactagaaataccatttgacccagctatcccattactgggtatatacccaaaggattataaatcatgcacatgtatgttattgcggcactattcacaatagcaaagacttggaaccaacccaaatgtccaacaatgatagactgcattaagaaaatgtggcacatatacaccatggaatactatgcagccataaaaaatgatgagttcatgtcctttgtagggacatggaggaagctagaaaccatcattctcagcaaactattgcaaggacaaaaaaccaaacaccacatgttctcactcataggtgggaattgaacaatgagaacacatagacacagggtggggaacattacatactggggcctgttgtggagtggggggagagggagggataacattaagagatatacctaatgtaaatgatgagttaatgggtgcagcacaccaacatggcacatgtatacttatgtaaccaacctgcatgttgtgcacatgtaccctaaaacttaaagaataataaaaaaataaataaataaataaactttaaaaaattaccaccaatatttaaaaaaataaaggctaaagctagcatagggctcatattttaataacatggtcattatatagatcatgataattacctgtgggtattggtaaatacattgctgcttgataattgtacttcacttcaagttcagattagagtgttcctttagtatgccatggaagcagctatttaaagagtcaggctaaacctggcatgagaggaactctttggaattacagtagcattccaaagtctttgcagtttccatccagttcttttatgtggcaataacaattaattcagtttaaaattatttttaaccagtagattctgccatttcccttaattccttgaaaacagttgagcaaatgtaaaacatacttgatttgaaatctagggcagtgtttttcgaaatgtgagtaaggactcattagtgatatgcaaaatcgactgtgtaattcaagcaattttaaaatggaatggaatagaataggaaatactagaatgtgctacatgatgaaggagcgtgatgttttgtgaaatcttcatttcgattgtgtgtgtgtttactaaattgtgatataaaatatatttcccactgtggcatatatttcccactagattgggtcaaaaaagtttgaaagccactaccctatacgacgtagcaatattgcacaaggagtgggatcaattcaaagtagccacttaataaaattggcttaataatttgataacattgtaatcatgtccccattggggccaaaactggaattacattatcataactcccaaaacataatcaacacctgattcattcaccagacttaacctcaaataacatttaattatttccaaaaattaaacccatctctaagaggtgagtatttgctaccacataaactatgcagaataatttgctgtagattataaagtcaattccaaaaaagcactttggggctgggcgtggtggctcacgcctgtaatcccagcactttgggaggccgaggcgagcggatcatgaggtcaggaaatcaagaccatcctggctaacatggtgaaaccccgtctctactaaaaatacaaaaaattagctgggcttggtggcacacgcctgtagtcccagctactctggagggtaaggcaggagaatcgcttgaacctgggaggcggaggttgcagtgagccaagatcacgccactgcactccagcctgggcaacagagcaagactccgtcacaaaagaaaaaaaaaaagcactttggagaatgttttgagcaaaagcaatcactgaagttatattcagaccactatccgtttgcatatttattatatttaattataatcattgcataattttctctcagtgagacttagcccctattgtacaggagcattattttactatttctgtcttcttattgcctttatatattatctagcacataagggacatttaataaatgtttgccaaggaggtggtactcatttggataaatacatgttctgaaacataatgaatgactcaaggttacagcctatgctaaggctattcatgcttcttcacttcaaagaatgtacttttcaaagtctctcagctctacaaaatagggccttattggagtttaaaatgtataccttttaaaatcaaaggaatacaatttaaaagcaaaatgatacattaatactagaatatcatggatgcaagcagagaaataagtgctcttatacaatgcttgtgatagggaaaactgaggtaagtttgtaaatacatacaaaaaatccttaaatatgcttactctagatgcagaaattttgcttctagttcttcactctgtggaaaagtaatgatcttcaaatatgtatagagggttaaactcagtgctgtttacaatagataaaaataataggaaatactaatgctaggaaataagtgaattttctaattcaacagaataatatgcagccataaaaaccatggtattcaaatacattggcatagaaagggattcagcagacatactgtaaaaagcagaaaacagagctgtaaactacagaatatcattcaaaaacatttttatgcagtaatagtcacgtaataaaattaatattttaaaagtgaatagttcagtgactatttagtacattcatattattgggctactgccccctctgtctagttccaaaactagattttcatcattccataaggatgtttgcacccattaccttctcctccagcccttggtaaacaccaatctgtgttccgctctatgaatctacctattctgatattttatacgcatggaatcatacaatatatgaccttttgtctctggcttctttcatttaatgctttggaggttcgtccaccttgtaggggtccttaattcctttttatggctaaaaatatttcttagcatatatatatcccacgctttgcctatctgttcatcaataaatggacatttgggttgtttctatcctttggttaccaggaatagtggtggtatagaagggtgtattgccgaatatcattttaatgatacaagtattagcagccattatttttgggtggacggattacgggtgaattattttatgttattcagaacactgggctttggaatcaatcagaacagatcccatttcctcacgtgtaaagtgaggaaaacaaaacctacgtaattgaatgatcatgaagagtaaataaatatgtatatgtaaagcatttagaaatgcgtggttggggggagcacatggtaaggactgaatttgtagtatttttaaaaaatctttaaaacattttgtttttcttttaattagtgttaaagtcttttttttttttttttttttttttttgctagtgtacttgcatgctacacaattaagatgcatggtccccttcgctgatggtcacctgggctagtgccaaaggctgctggattgtttgatctgatgacatccgtttgactaagtatagttctacactgtaactctccctccaagtttcaattaaaataatgttccaagcagcgtattctccagcccctctgccacagctccttttccattctagtctttgtttcagcatcactttccatgttgcagacccaactacccaggttttacattttaggaactgcatgacagggacagagggacaggtgaagggcacaggctttctcatacacagctagcaaaatacattacgatcaggttttaccaaatacataacatttctcccacaatgtccctctttttactccccagaaaatctcattgtaaactcaaactttgccaaatatgctcttcttgaaccaacagaagggttaccatcgggagccagccgggctgcaggaggcgccctcctgccacccctccagccccatctcgggtgtgggaagaccgagttcgcgcccgcagcccccgggccgccccagcgcgggagtttcgaggggagccgggggagagctgcggcgtcacatggggggccagccggggacaggcgcctggggctgagtctcccggcgaagccaccgcgaaggggccgcatcccccagagaacgaccctgggcgttcgcgaaggcctcgcagagagggggagcccgcctgcgcgtccgcgccctcacaggtgtccgggtggcggcgcccggccccgcctgcggacccgcgagaggcgggcgcgggcgcgcctgtgcgccggggccgggggccggcgggggaggttcccgcgaggtggttctcgggctcctcctcggcgcctcaggtttcctctccccgccagcaggctgctggctgcggcgccgcctctctctactccctcctcccaccgccccccttccccgcggttgggcccactctgcggcctctgcccgcctcgccctcgcccgggcctcctcccgctttctctctccgcttcccctggagcctccgaggagtccgcagccgctgggcgcccgggaagatggcggcggcggcgggagacggcggcggcgaggggggcgcgggcctgggcagcgcggcggggctggggccggggccggggctgcgcgggcagggcccctcagccgaagcgcacgagggcgccccggacccgatgcccgccgcgctgcaccctgaggaggtcgccgcgcgactgcagcggatgcagcgggagctgagcaaccgcaggaaaatcctggtgaaaaacctgccccaggacagcaactgccaggtactgggacggtgataggggcgacgcgtcccgaggggcggcggggcggcgctccgtgtccaggctgggatcgggggcgcctcagagcggtcctggggagtgggtcggcgccgagtggtgagagcggcccctcggtttgactgagttcttggggtttctagcctgcagacgccctgccagggaggggggcagattgggaaactgaggctctgagtggcgaagcggcttctccaaggtcacgggaatcaggggctgctgcctccaagttcggcccggtctttccttcccctacggccgtagaggagtaggaggtgaaggagagtggaggtgagttgtggagcacacattttgcgggggggagcgggggtagagggggccgaagcttcgggagcaccttggcaggggcgagggctccaacgtatagtccccggtgctcgggagtgccatagggggcaggggcacgagagagctgggagtgagtttcgctgttgttgcagaagcacttgcccaagtttctatgaaacaactctgtcttctcagtttgctaaggccccagaatagagttattgctgcgctccttggagccttgcagccgcctcctgctacgccaagtacagtactggagggtttgttctcagtgacttggatgaggtttaaagatagctactctgtgt

SEQ ID NO: 164 - DNA, 6000 bp, Homo sapiens
actgcagccactcactctcacagttcataccctgtatctacttatgaccaacagcagcaggaagaatgctgctatgtcccaaggaactctgtattccacacattagaatccacctgtgtgcccaactcatcccagttaccagaattccatcaacagagcagcccaggaccaccaagtctccttacaatgatataattggcaccatcaggtgtatcacttccttttaaacacaaatataatgactccctatcacctgatatagcaaataaaaaattcttcatccaccaccttcatccactattctatcaatttccctgtttcttctctactctagactgacacccccacatatgtgtgttcttcattccacaacatgccacagcatgtccatttctgccttctgattctatatgggatgcccttcctacatttcaccttcaaagctgatcttgaaactcctccatcagaaagtctgaaaaagatggaatcatctgcctgctactcaatgcatagttaattaatccctgctgtaacattgcataggagtttgtacttgtccattgtaaaaggtaaagtaccactctggttaaaggtgcacccagtgagaagtcagaccagggctcaattcctgattgtgcctcttggctcacttaatgtccctgaacccatgcagatctacaccttgcagggtttgttaactgataactaaagagatggcacaccaaagcataatataaagacattttgaatttattccttgtgatgtttaagacaaggttctgtacaagtacggacgaccaaagcaaaaatggacaaacggggtcacatcaagttaaaaagcttctgcacagcaaaagaagcaatcaacaaattgaagagacaacacacagaatgggagaaaatatttgcaaactacttatctgataagagattaataaccagaatatataaggatctcaagcaactctacaggaaaaaatctaatactctggttaaaaaataggcaaaagatttgaatagacatttctcaaaagaatacatacaaatggcaaacagacatatgagaaggtgctcaatattactgatcatcagagaaatgcaaatcaaaactccaatgagatatcatctcactcctgttaaaatggcttatattcaaaaagcaggcaataacaaatgctggtaaggatgtagagaaaagggaaccctcatacactgctagtgggaatgtaaattagtataactactagggagaacagtttggaggttcctcaaaaaaactaaaaattgagctcctatatgatccagcaatcccactgctgggtatatacctaaaagaaaggaaatcagtttatcaaagagatatctgcattcccatgtttgttgcagctctgttcaccatagccaagatttggaagcaatctaagtgtccattaacagatgaatgaataaagaacaaatggtacttacacacaatggagcactattcagccataaaaaaagaatgagatttagtcatttgcaacaacatggatggaactggaagtcattatgttaagcgaaataagccagacacagaaagacaaacatcacatgttctcacttatttggaggatctaaaaatcaaaacaattcaacccatggagatagagagtagaaggatggttaccagaggctgggaagggtaatgggggaatggggacagtgaggatggttaatgggtacaaaaaatagtttgaatgcatgaataagacctagtatttaatagaacaacctagtatttaatagacctagtatttaatagttattatagtcaataataactgtacattttaaagtaactaaaagggtataattggattgtttgtaacacaaaggataaatgcttgaggggatggatacctgattcccatgatgtgattatcatgcattgcatacctgcatcaaaatatctcatgtaccccataaagatattcacctattatgtaactacacaaatttaaaattataaaagttatttttaaaaagaaaaggttctggtataaagaagatgataccattcagcctctttttttttttttttttttgagacgaagtctcattctgttgcccaagctggagtattagtggcacgatctctgctcactgcaacttccacctcctggtttcaagcgattctcctgcctcagcctcccaagtagctgggactacaggcacgcaccaccatgcccagctagagacagggtttcactatgttggccaggctggttttgaactcctgaccttgtgatccgcccgcctctacctcccaaagtgctgggattacaggcatgagacactgcacctggctttttttattttttggaaacaatctcacactgatttgtttcccaaaacagtcgaggagagtttgggctattataatatctatcagttctttccaaacattcttttcaggtaaagtcaggtttacgtacttggttatgttcaatttaactctgtgtgacgaggcaatgctgtgtccagcagcgcccatttccttttccatgaggcacacattctttacttcccagccacccttctgggtagggccatgtgaccatgcgcatgagttctggctaagggaatggggtgaaaatgatacacaccacttccaggactggcccctaatatctctgacaagttaaccacggccagcctcccttatctgagggccacagatttgactacattaccaaggcctcggcatgggagaaccaccaaatgcaagaagcctggtccttcaatgaattcaagaagtacagaccccaccctctggccccaaccaacttgttaccacactgtgacttgtatgaacataagcctttatggagttaagccccgagatactggttttgctagcctactccaattaacgcaccttatatttaccaccagtggtagcataagtgaaaagaacccctggacttagttccaggacccgggataaaaattctggctctactactaccccgacatatcccatgatctgctcctagaatatgctctatactcttcccaactgcgtgtctactgcattttcctctttcattagacagccctcctgactcttctctgcctcacgatttctgtcagagtggggggccttctctgacctccgtcccatacgtggtcacttctctttgcttcaagtgcagcgtacgttcctctgttttagaatctacgtttttattgcaaatatttgttgacatgtgcttccccagactgtgaatcctttaactcccagcatttagttacagtgtctggcacacgtagaaaataaatatgcattaaacgaatgattgtcacatatgaccttaagtgagtcaattattttttaagtctactaaataaaatttttgaaaattgttgtaatgatgaaataaggaatgtgaatgtgacttgtaggttataaacagattctaacagcaatgggtttactcactgtttgtaggcccttctcatcttttctagtcaaatccatcttaatgctgcaaggtagcactatccaatagaaatataatgcaagccatatttatagccacatttaaaaagttaaaaccaggtgaaattaattttaatatatttaacccaatatacccaaaatatcactttttaaattaaatcttctaaatcttggaacacatctctattcagaccagccacatttcgagagctcaggtgtcacctgcggctacggctcccgcaaatgggacagcagccgcaaggccaacttcagatagcaacctgacttcccctcaggcagaataagtgactcctcctcagtgctctctcaagccctttatcctatcgtgaaaactagagggtacgctccttgaggaattccagactgttgtctggagaaatcgctctcggcctcggtctggcctgtaacgggcggttacgcaattccaggtaattgacgaaccctgaggacagaactccgtgggaggcccagtagccagagcggaaaatggtcagtcaggcaagagtgcgggcaagtggccacagcaggctgcgattccggcgcccgccgccctccaagcgtctcgggccgcaccctccccacagcggcgggcgcggaggtcccgggttcgcgtttgggggcgcctgagccgcagccccgccccctcccgtccctccctccctccctccctcccactcctctccctcccactcctctccctcccactccccgcacctccgccgccgcagagccccggaagcgggcggggatttcctgtgcccgccccgccccgcccgcgcctgccgggccgccgtctccgcctgtcgctggctccgccggccgccggctcccagacgcaagcggagggcggaggggaggggcaggcggcgcccgggagggaggcaccgggccgcgggccaagcctaccgggggtgagtggagccgggccggagggagctgcggctggagggagggacgcctggcttcccggggcggctggtgggggctcggtcacccataggggctgggaggaggatcggcgcgtcttccgggttgctgcctttcccgggggtctgccccgctgacattctgtgcccgcctctcgccctgtctccccgtgcccatcgcaactgtcaggccctgcgggctcccgccgctgtcactcgcgcacaggttaccccgtggctccctttctcttcacttgctcatgccccagctcatgggaaacctgttttctgacctcacttcccctgctccagttctgccttgctcggattctctgaaatctgaccctttccaggggcactgtgacaagaagaagggaagaagcaaccttacccctgagcaggctcccgtcccgcccatgccctacccgtggcaggggccagggttctctgatggacggagccaactcgtccgtgtgcccttgggctactcatttttataacatggccccttttctgttcatcagcactggctgcagaaacttccttttgcaggtcccttgctacccatatgtgtgaagaaaagggggaaatgaaagccctagaacccacactgcagtgggcatgggatcatcctggaaccaggagaaacgaggttagggctaccaccttaaccgcccaggtgctggctctgcgtgaatatcttaggaaatgcaagctgaggacaggtacccatcccatcctttgctgagatttttgctagcacttccacggatttctgtcagtggtatagaaaaacttacagctggcccaatgggctctgcacaaagaggcttcccattaagagactctgctacctgggggagatggagaaagggtttgagacaagtgtccagatatgtagctagaggtaaagccttcagggaggatttgcacaggagctagagaaccagaaagatgggacgaagagggagaattagtgccctgtgtgttaaaagtggatacagagctggaattcagagaagagagctaaaatggaagtttccctttattgctttagcaagaattttcctttctcatgaaaagtctctgaaaaggaaacctcctaggctgggaatcagtccagggtgctcccatgaggccctgagccatctttggacttctgagataaaaagggaatttgtttttcctgtgcattgggcttagggttcccacctacctcttttgtcaaagacaaataggcaagaaaatagacgacttgacatctgtgattacctaccctggccttcaaggttcttgcaagtgttattgaaaggatgtaagtaagccaggatagttaccaagtttctgactgctcttggaagcctttcactgactctgactgtttggatattgaataagaatacccaaaatatgttgccaaacagaaagagattctgagtctcagattatttctctgccataaagccctatcacaacagaagtgtgacccatcctgctcttaagttgtctaaagaaaaagaagagcccactatctggtattgtacactgcag

SEQ ID NO: 165 - DNA, 6000 bp, Homo sapiens
ccaccccccacagagggttatgcacagtgatacagcgatgcttggaaaccactagagctgtggtaagagcgttgggtttgacctggactcaaacttcctcctctgccgcttaaatcggtgtatgaccttgggggtcttctctatctctgatcctcagcagggaaggcgagggttacctgagacaaacctgggagcctcctgacacggagtagagaccacaactaactcagcacgtagggcaaacagaaacccattgaacaaccgggccggccccccgcgcccaactcaccgctgcccggcggccgctccgaggagccgggagggagggttgcggggccacagccggcacaggcgcaggggcagtaagggcggcatggcggcgggcgggcagctgggaaaggaggctaccaagagcgcattggaccaggatggggctagacttcaagcacccgggggcagagggaaggggcctggcccgttgttctgcaaaggaagactgaagcaggcccggagagggggcggttcttgcccaggaccagacccgcgtgtccttggacctgccccttcctctgacccgggcatccgcagcccttcccagcgctggcttcggggtctggccacccagccagggaccccaagaccccgttcccacccagggaacttggggacgggagaaggaggggccacaaccaggccccgcccccgctgctcacagacccgcggccgtcgccatttcctgcgtctattcaggccccgccctcacattctcattggcgtggatgccaagaccacgtccacctgtcaggaaaaaaaaaaaaatcggtggagaccccgcccctacatgtctattggcctttggtgcctccggtcccccagcctgcggactcgctggacaggcgcgggcgcccacctggggagcgggcgggacagagcccgctctctgcggctttgtgacgttttcggcccggccaccgtgtctccgttccgctgttgctcccctctgcagcgaggtatatcttacggagctgcttccgccccggagcctctctggagccagcaaagaaagggaggcacagttcttatcccctgcttgcagagggggacacaggctgggcgggtttttttttttttttttcccaagtcacttgtcctgccttacacactcagggcccattgctcctctctgttacagaaatagcagatgccaacggaatccaagaataaagtcgtttattattttcagagcggcgggagtagggctggggaccctagggccgctccagtgggacttccctgaacccggttgtagaggatgatggcgcctttggccgaggggcagagttcagcccacatctccgtctcgagcaatctctgcacgttctgtggggagacaacgagacccaggcattcaagcttgccacttctcctgccagggctgtgcccagaattcctgagcctcagagacctctgcactgtccttagggaggcatgttaaggggctgaacatgtccctggacctttcccttgcactgagggcaaatcttgtgactctggagggaattgtgacccagccaacacctcccctacaagatatgcattgccaggcctctgcaggccccagccctggcctccaagcaagatggtttgtcactctgcacctgtgtctccacaaagaagattcctgtagactcgtgggcctcgggtcccccactcaggtagtgcttcctcacctgctcagaagtcaggctgcacctggacaagaacacaagggtggcttagtgggtgaccagcccctgcggggtacctgtggagccacagctgcctcagcccactcctcaccacccaccttcccaagacccaggatcatgtacccgagcctactcactggacatagaactcggcactggctcggccagcactggtctcatttcgggcgatgcccaacagcaggggctggctcagggtgagcagcggcaggttcacctgcggtggagggtggggtggggggaggtcccacctatcaatgccactgcccacatccctgcccgtctcaatgaaaaaccgcctgttacctgtgtacagcattttatagcttgtagatcaaggacccagcattacagaatgtcagatgatgggcatgtttgttttacaggtacaccaaaaccagagagattgaacacgttgcccaaggtcacccaagagaagtcaatttagtgactgggactcccacttactcctttttctttttttctttttttgagatggagtctcgctctgtcgcccaggctggagtacagtggcacgatctcagctcactgcaacctctgcctcccaggttaaagtgattctcctgcctcagcctcctgagtagctgggattacaggtgcacgccacaacgcctggctaattttttgtatttttagtagagatggggtttctccatgttggccaggctggtctcgaactcctgacctcaggtgatccgctggccttggcctcccaaagtgctgggattacaggtgtgagccaccacaccctgccacacttactcctttttcttttttttgagacggagtctcgctttgtcgcccaggctgaagtgcagtggcgcgatttcggctcactgcaacctccgcctcccgggttcacgccattctcctgcctcagcctcctgagtagctgggactacaggtgcccgccaccacgcccggctaacttttggtatttttagtaaagtcagggtttcaccgtgttagccaggatggtcttgatctcctgaccttgtgatctgcccacctcagcctcccaaagtgctgggattacaggcatgagccacggcgcccggccacttactcctttttcaacagacttggggagtaggcaagatatttatcattgtttccattgaaaagaagaatccttggcggggcaaggcatgagaatcacttgaacccaggaggcgaaggttgcagtgagccgatatgccaccactgcactagcctgggcaacagagcaagactctgtctcaaaaagaaaaaaaaaaaaaagaagaagaatccggcctggtgcagtggctcacacctgtaatcccagcacttttggaggctgaggcaggcagatcacgaggtcaggagatcaagaccatcctggctaacaaggtgaaaccccatctctactaaaaatacaaaaaaaattagccaggcatggtggcggatgcctgtagtcccagctactcaggaggctgaggtaggagaatggcgtgaacccgggaggtggagcttgcagtgagcagagatcgtgccactgcattccagcctgggcaacagagcgagactctgtctaaaaaaaaaaaaagaaagaaaaaagaaaagaagaagaatccaaggcagagggtactgagggctagaattccactccaagtatgtatagctgcaaagccaacttcttccctcattgctggccagatgcctgcaggcctcctgccagcccagacctgtagaattctggcaagtcctaccccctcccttcatgtctaccaccctgtccaggtcaacctcactcacctcatcacagatctcctgaaggacactggaaaagagttcatgtaccaccagctgcccagcgaggtcctggtgctgggggctgccaccagggcacagggcctgtgagaggtcaggctcagcccctgctccccacctcttccccctgccccatctcaggaccagcaagcctatacctgctggccttgagggtctgatgtggcacagtgtaagagagttagtgatcctgagtctggtgtcctttccctgacagacaaccagaggtccagcttcaaaggagatacacagggggcaggggtggagtagggcatcttcttcctgtgcccaatctttcctcccgtgttttctagtttctcacaggactggggcaggggtcagtggggaggcaggtggactgccctgagcaaacttccagagaaataccaggccaattttccctttaaggaatgaggaaaccaaagctgggaggattgggagggtggagagctgcagctcccttgagctgtctgggtctttgtgcccagcctggaatctcacctgaggctcagggtgcccaccaggtacgtccaccagcccaggggcctcagccacctgccgggagcggcgcaggaagacaaggaagtcatcggctgtggctagtgcagcgcccacccccagtgggtccgccagataggcctgcgtgtcaccccagtcggtggcaccctgctgtcgcagccaggcagctgagctggaccagttggtgcccaggaagtctcggtaggaagtaaggcccaggcgcaggagcagctgtggcccccgagagccaataggcgccagggtggctgagtgcaggcggaacttgggggcgtcgaagagccagggttgggcctttagccgggtctcccagatggcagtgatggcctcgtccccacctggcagtgggcgacggtcatgggcggggctcagctcggcctgtatctgctcctggggcaggcccccgccagggcactgcagcagcaaggtcacctcaggatccatggtctgaacggggcagctctgggggaggatacggccaggcctgtcatccaggggggccactaccactcctgggctgcgcagctagccccctctgtcgcagacctcctgagggtatccgcagcgcttctccacccccctgaccactccttgggcagtaaaacgtgccatcttccccgcaggagccccgagtcccgcagggtatccaggacgcccgggcatccctaccatccagaggtcttgggttcaggcgccccaaatgcccatgtcccccaaacccaggggtctgcctccgacccggggcgcgcggggacccctttccagggcccggaagctccagcctccagcgggcgctcaccagccgccgggtccctcaggctccgccccttccccgaagcggaagtgcccgccccctttccacgcggcttttcattggcgggtccgccgcggtcgaggatcctggaggtttgtccccgccgccccgacgcttccgcccggtccgtcggcacgtcggccctgcctcccggaccaccctgcggggcgcaccagcgatctggggtgcggggctcggcctccctgcgctcctggctgaccgtgtgaccttgggcaagtctggcctgctgggccttagtttccctctctgcagcagggacttgggggtggtgaacttaatgagccgtatactcccacccagcgctcacttcctgaggctttgtgactttctgggagggatggggacgtggaaggggccttaaagcagtcccccctcgtcactgccccccacaggtcttaaccatgaacttctctggaggagggaggcaggaagcagcagggtccaggggtagaagggctcccagaccccgagaacaggtgcgcgcctcctccccaccccctcccaccagtccaggctccctgggagttgctggggggcggagctgaagggtcctactattcctggagaccactggcactcctttctctctgggctctctctgcagtgggtcattgagggttcaggatgggcagtagggcagggtcaccatggagactaggggccaccgctgggttctttcaggaccgagacgtgcagctgtccaaggctctgtcctatgccctgcgccatggggccttgaagctggggcttcccatgggagctggtaagtaggggccttggaggctggggcttgagcccagagagaaacgtgagcctgtctgcgactcctccctgatggctgcctccaccgctccctgaggaaggcacagagtgcacttcctccccatgcacagaggagagcaaggcctagagcccctgtcatgtccacagcagactgaggagagttcttgtctgggccaggcctggtgaccgccccctccagccaagcagccagatcagcacttaccccgagggcgagccctggaggatacg

SEQ ID NO: 166 - DNA, 6000 bp, Homo sapiens
cgatgccccctcccttttccaggctgtgacgaacgatggcttcgtgggcttgtaagtccacgcgcggcaaccgagtgtgaacacatctgtgcacccacttgggtgggcgtggctgggcaggggacatggcccagtgagtgtgtgtgttggggggtaaggtctatgttcacgtgtccaaagacagctttaagaagtaagcagcaaggaagtaaccatgatagctccaggacacagaggcttcgccacggacgcctctgagaacttcccgtgtggcagccagcaggtccattcctctgctacgttaactgctttcagattccaaaactgacggaaggagaatgggcagagggtggttggtgcagatgtgataccaatactaattaataagcatggtctacgtccccttcttcttcttctttatttcaagtaagctggcatgtttgatcaacaccagatttgctgcctggaagttttttatcttgttattctgaacaaggaccctaattcttcttacgaataagagaacctctctgttgggtatacagtattcagttggtctgagaaaacacaaaccccactcaagtctccagacttgtttacacagaaaactgaacctgtggctggcctagagtctgagcctattctgggcattgtttattgcaatctgcccaggccctcctgcccccaccacagtcaccaccacacacgaacctggagaatagaacctttctttggaaaggggggttggaataggattgagtgaccatggtattaggtcatgcacacactgctgaggatggccgcactggaatttgataagatgatggccataagcttttattcccaggtggcctcataaaatggtggggagatactcagtgtctccagcaaacagagaactccacatgtggttgctgtggctgcagctctgatcattatacagcctgagcttaccctagacactggggttactcagcctgtggggttgtgctgcccagaaaacaaaacaaaacaaaaaacaccaccaccaggcagcaaattcctccttccacttctgtgtctgatgtattgggtgccttctaagccctaatgagcctcactttgtacagtaaatttcctgagacataaaaaagtatttaaaagaaagtttcctgttttttcctaatgagcaaggtgaggatttatagtgtggggaggagggactccggcagccggggccaacactgaggcaagcctatttaacataccctggcttaagctccctcctgcgtttgtggggttcagagtgcttagttgtgggagtatagagacatgcagttagggagtgaaaaaacgccatttggttcggagcagatggctggctagggggctgatggcgtctaaaggcgtgtcgtcccctccagctcgaatccctaagggctccccttgtcttcccaatcaatgaaaattaaagtgcaaagaaaggatgaatagttggacctcgagtctctcctttgttcatcccagctactggtgcgcaggagttaaactacaacaggctcctatagaaacgctgaagttaaacagtctccccgttagcacagctttttaaagagagagggagagaggaaccaacttgggggtggggggagagaaatgggggagaggaagaaggagaagaaggaggagaaggaagaagaggaaggaggtggagtaggagaaagaggaggaggaggaggaaaagaaaaaggagaacaggaggaggaggaaggagagggagaagaagaaaagggctttctgcttgatttccccaatacagaatcgcgtggcataaattaagttggaaaagaatgaacgctttgggcaggattctgatggattttacgatgcctttcagttccgctttgccgccgtaatcgagaaatctgtgccatgtcaatttaacaaatacttgatactgaggggggtttgttagagatttggggcaagtctttttccccccaaggtttaagcccttgcgcgtggaactttttatttccagttttctaaacaggcattcaaatgagcctgttttccacttccattttctaattaaaaggttcctgatatttcatttcttactgaaatctacactcagtgttgcaggcagaggattctggattctgacctcgcattctcttctttttttacatttcttctgctcctgaaaccctttcacctaccctcacccccacccccagcccccagcacagggaacagctcctgtgccttagggaagcagaatgctccgaagtcagcttttggaggaaacatcaacctagagaaaaaaggatcctgacactaggtggcaagattaaattaggatttgagctggcccctccctgtggcgacagcaagtccctatagagtccaaaaaggacaccatcatgggggtggcagcatcttctgaagcctccatttgctctgaaccaaacagtagggggttcacggtgatcccagcctgcctttctcacctggcactaaacatcatatgcttgtttcttgtggttaactcttcgctattccatgaggcaacagtggaaaacctaaagtggacatctctgttgatcctaaaactttacaggtatttgggaaacaaggtagcaggacacaggctgggtcacttgaagaggagccgcagagtagcaattccagctgcgtagcagccggagggcctgccctggacgacttcaccacgtgaccttcagatttctggctgcagtggttgtccttggtgtttgaagactttccctctgcttagacactttgatcaagacatttgccgggatgaaagtctcgttctaccttgacggtgccctgttctcaccaataaggcagctctaacacacctacagtgaggacactgtggccaggctgcttccttggggctgagctacaatcaaagggggcactccaacactcacctggaaccctaatgaagctacggaggtgttgggggtgggcagggatccacgggcgggatggtaaagagagggagaagtgcaaagctaggtgccagagtaggagtctctgccccaacttacttctccatcgtgcctaggagggcaatttagataattcattgtgtcatacgtgtgttctcggccctcccaataaactcatttccctttaaaaaatgaaaacaaaagttctagtgtctgatggacgtgtaaaaacctaataaggtgacggttgtgtaaaggttgtgggttgggggccggggctggaggggctttagaacatgcgccggacattgttgcagaggccgcggcgcgcgcggaggggagctctttctctccgcattgtgcggggagcaggtgctgtctgcattaccatacagctgagcgcacaaagagccactgattcagcctcgcacaataacaggctgccttaatgacagccacgcgaacgacacacaccaaactcacttcttaccaggcggagggaggccgagggggatacccgggagagaggggccgagacccggggaaggtggcggcggccgaggatcctgtgggggagggcgcgtgtctgtggggggagttgaaggccaggttctcctggctccggggatatgctgtccggcccccgggcccctactcccagtggccgcggaccacgagaggacaccgaaggcgcggggatgcgggtgtcccagggggcgtcccggccccgcccgcgcgtcggctctgcactccccgaggctcagtcgccgtcctgggccaggaggtgtccccgcctcggacctccccaaacttcccgaaactgccgcttcgctctggcagccctcggcccaccgctccgcccgcccctttcctacgatgctccccgaatcgccacccccgcctccgcccccaagagactcctccttaggaagcgcctgccccgaagaaggggcggccccgccaagagctcgggcctcgaacttcgtcctcctgctcgcagccgccctccccaagcccccgggacgctgtcggcgcaaggagacccctcggctgccgccgcggcccggagtttcggaggccgcgtcccgccgctcaagtggggcccgcagcgccgccccccgcgtgtggccgagggtctctgggcgtctgtggcccgggagggcgtgcggaggggacggggcggcggcaccagctccagaagcagggggattcttgcggtgaacattttgcaggaatgtaaatgagtgcgttttgtgtggtgagggaggaagggggggctgggggcgggggcaggggaggactgggggggcggggaagggtgggggcggggaggagggttgcacattttacagctcactgaccatttggcgatccattgagaggagggtttggaaaagtggctcctttgtgacagctctcgccagattggggggctgctgatttgcatctcattagccatgcgggcggccggctgaatataagggcggcaggcgccggcgagagccagatcctctgcgcgcacccgcggagacccgacccggccgagggcagagcgcaggggaacccgggcagccgcggcgcagagcctcctcccacggcccggcccctccggtcctgcgcgtgtgtactggatggcattggctggattcatcggaaagacgcggatctttgctgtgacaccggagatcggagcccggagtgctcccggaacgaccgccgccgccgagtgacaccgggccgcgatccgcaggggccgccgcgcacacccgccgccgccgaccgtcccctcagcgcgcgccgctggccccggattatcgccttgcccgtgggatttccagaccgcggctttctaatcggctcgggaggaagctctgcagctctcttgggaattaagctcaatctctggactctctctctttctctttctccccctccctctcctgcgaagaagctcaagacaaaaccaggaagccggcgaccctcacctcctcgggggctgggaggaaggaggaaaacgaaagtcgccgccgccgcgctgtcccccgagagctgcctttcctcgggcatccctggggctgccgcgggacctcgcagggcggatataaagaaccgcggccttgggaagaggcggagaccggcttttaaagaaagaagtcctgggtcctgcggtctggggcgaggcaagggcgcttttctgcccacgctccccgtggcccatcgatcccccgcgcgtccgccgctgttctaaggagagaagtgggggccccccaggctcgcgcgtggagcgaagcagcatgggcagtcggtgcgcgctggccctggcggtgctctcggccttgctgtgtcaggtaggcgggcaggtgggggcgccgcggccccgcggggtctcacgggtagccggggcgcggggcaggagcgcgcggggaggggcggacagcggcacgggccgcgccagccacggcccggaagatgaatcccgggggcgacgaccccagcgccggccgtgcagcgagcgcgctcggcccctgagcccttccaggctctccgcacaccccccacccaggcctcacgccccctagctcgggcgggacccgcgtcctcacgcccccgccctcccccgtgcaggtctggagctctggggtgttcgaactgaagctgcaggagttcgtcaacaagaaggggctgctggggaaccgcaactgctgccgcgggggcgcggggccaccgccgtgcgcctgccggaccttcttccgcgtgtgcctcaagcactaccaggccagcgtgtcccccgagccgccctgcacctacggcagcgccgtcacccccgtgctgggcgtcgactccttcagtctgcccgacggcgggggcgccgactccgcgttcagcaaccccatccgcttccccttcggcttcacctggccggtgagtgccgcacctgcgcgcgccgggccggccctgaagctgggcgggctgcaggacgcgctgggatcccgccttgggcgctcggtggcgggacctcggggaccccgcgaggcgc

SEQ ID NO: 167 - DNA, 6000 bp, Homo sapiens
gcagctgcaatgctttctcctgattcctcaaaaacaacccacatccccacctccatgcaccaatgcatcattcttacattctctccaactggaacgtttcttattttttgctggttaaagtcatcacagtcttactgggccttatctcccaggtgaagcctgaagtacccagacccgctttcttcatgtctcacctctgtgatggttcacatcccctcccacctttcatatctgccacctgtgcattcatctcccccatagaggtgcgagcacctggagtagagacaccgtccctgcctcctctttgctcatttattcctttacagtgagtttctgggggccatgtgccagccaggtgctggcaccagccagtttgcatgggggtgcaaacacgcaacacccccaggttagatttggcatggggctggagaggacctggcaggagcagggctgtaagctctgtggcccagaagcattccatctatgtctgcaggtcatcaggtgggctctggtgtgtggcacagagctctgttaagtctcatccctaccttcgcctctacatgaaaaattgcatgcaggccctttaaagggggaaatatggagaaaaccattttgaattcttggttcccactggggagaggttctaaggggtggggatcaggtgacatcatgagtaactcacgaggcagggtagaagcatctgaacgaggcatcctaggagataaagagaaacactggctccaaaattaaaacaaaacaaaacaaaacaaaaacaagcccaggtcacttggcctccccgctttgatttcccacaggctatgaccttcaagttaatgtttcctttgcagcgtacacacagtcccagttactgattccccaaaaacaagctgaatcatcattatacaacagaaagagaacccatgtctatcccatcccccattcacagagccctgagccaggcttgtctcctaatctgcctctggattggagcagtagcccccattgttctacccagacttgggctgtgtaagtgcacactgctttccctgggaggacttagccaccagggccctgcggaaagcccgggcagaggctctctctgcagggcttatccagccactgtcactgcaggtgcctctcctggatcagggcctgtgcagggctgtgggatacacagatgaaacaggccctgtccctgccctcagaggtgttgcagttgataaagagacagacacacatataaatagttgcattagagtgtggtctgtgctgtgagtgagggaattcccaaggagaaggttggggtcaggcttcccaaaggagatgatgcacaagcccatccctggggcacaggcagggctcagctggtggcttcaagaagcagggcattcccggcacagtgaactgaactggcaaaagagggtttcagtgggactcgttcagagagtatcatatagtcctgggacagggacaagctggcttctgccactgtctgacctcaagcctcagcttctctctctggtctatgaaaggatggattcggaaatcacacagttacttccaccatctttcatgtgttaaaaggaagtcactacgttcagcctacattcaaaggcaggggaattaagtgccactccttgaatggaagagcatcagagagttttaaaatgaccacagtccacctactggccacaaactacttacatccttccacatgcaaaatacattcgccctccaaacatcccctcaaagcctcatcccactgtagaatcagctcaatatccagaatctctgcatctaaatcaggctttgatgtgggtgaagcacctggggtattattccctcaagtgtagctccttgagtagagttgctctcaatctacagacttaggaattccagagacaaattaactgcgcctcccccctgcacccacctgacataaactggtgggataggcattggataaccactgtagacgtgcctgctccaaagggaacaaggacaggaggcatgcaggagtaactagtgtacggcaattctaaaatcttcctgggcgggtcctgaaagtctcttgaataggactcagtctgactctggccccagagtgattctccacgctcttggctccaccctttgggttctttgttctattccccaagtcatcccttcttttccatgaaatgcagcccaggttcatatccgtatagtttctcagcttgcttcctcccagaatttgggggagtctagaggtctcttttcattttatattgtctctgaccctttcagtccaagtctacactgttttgctcatataattcttttaaaaatgttgcatgtctcctgtagatctcactgaggttcatgcctttagacaactgtcaaacccacacatctctttgagaaaagcccttctctctcttgggcttctgctgagactgctgtcaaggacaactgtaagcttcttagaaatcctactatttaacaaaatattctgaggtgtccctttgttctctttgaagattttacaaaagatctcatgaccacactcttggcttcatctttaggccatcttccttgcactggcctgcatttgctctttgcctggaagccatttgttagttttagcatcatatgacatctggagaagctggacattttcacagcccaagttatggttcctttttatttaacaatccttcctttggcttatgtcccttctctcacattttagtataagcagcaagaagaagccaggaggaggcaccttcaacaatctccttaatgagatcccccagttcatctggtacattttctactttccacatgatttcggaacactttctgcttaaaattccctcctctcctgctccatacctctaagagtatggattcctctctgatttcctaatacatctttttggggtgtctaacctccaagccattgttcagtggttcctgtcgcccatctgccttctcaattttaactcccaagttcagaacacaccactttcccattgcaggcccctaacactcagccagttttcctacagattatatggcacaccttccacacacagggcatgcattcagccctggggacttcccaggagaataagctagtcttcgccatcattgtccagagacatgttaatcaagcaatcccagaagcagtgataaaattgcagttgaaggcagggtgcagtggctcatgcctgtaatctcagcactttgggaggctgaggtaggtggatcatctgacgtcaggagtttgagaccagcctggccaacatggtgaaaccccggtgaaacgtctactaaaaatacaaaaattagctgggtgtggtggcgcatgcctgtaatcccagctactcaggaggctaaggcaggagaatcgcttgaacctaggaggtggagggtccattgagctgagattgcaccattggactctagcctgggtgacagagtgagactctacctcaaaaaaaaataaataaataaagttgagagaggttcatgaagaaaaattacaggcctctctgtgatcacataatggaggaatctgtcctagtaaggctgaggctagggaaagcttccctgaagtcatggcattttagtaggaacttcctgaagaatgatgggggttctctggacaaagatgaacggcacatggaaactttatgagtcgagaagttccacagatatgagggacagcagggagacctgcaggctggagcctaaagaacaaggggacagtgcctgaaagtaggctaagtggatcagcaggcacaggccacctcaatcctgggtgcccatactggcttatgtgagcaaaatacatgcattaagccattcaacaaacatttatttagcaactgctacaagccatcactgtgtattggggatacaacagtgaatacatctcacaaatttcctgtcctcaaagagcttacagtctagtgggagagacagacaatgaacaaacaaagaaacaaggaaatatcagatatacagttaagtgctgtgaaggaaatagaacagggtgatgtggcagggagtggctgagggacttccttagtttgtgtgacctggaacagcctctctaaggctctgcatcagatatctgatatgtgataccatatgggagcaggctctgaaagaacactacaagtagagaggtaaaggcaggggctgcagcaagcctgatgtgttcaggcactgagcagagagagggccaggtggtcgggacttagcgagagggtcgcctcaaaagaagtgaggcttagcagggcacggagcagtgcggccgcaggtgtggtgggaagggtgttccaggagaaggagccacctggacacaggcttgcagtcatgaaacaatacgcaattatcactcccggcattctacatggccttgcctgagaccgggctggccaggatctctgggaaccaggaggaggggtctgcggcaccaggactgagtagaagggagagagtggagaaggggaattgcagagagaaaaccaggggctgtttttctctcggagaggcgggtaggcactgggcgggcagaagcgccgctatccacccggatgcgcagctgctaaggggccgcctctgcaagcggctgcaaattcccggagggcagcgtctcctttcgctctgctgtgtccgtagcacatggcaggtacttggcccatcaagagtgagagagggtgagcgagtgagtgagtcaccggcttggcgagggtctcctctgacccacttagccttgccagcgctcagaactgccagccctgctgggtgcttgggacttttcaaagccctgggaattctccaagggtccacagtaagtcttcttgacctaagcgggaaagagcgcaggcccctgcggggttggcttttacatggcatttatagacccgcccggagagggtgcgctgcgctcccgccatagtcccaccaccggtgagcgccgcccccactcggctgactctccgcccgccccgcgcccctcccctcacgggctctggccttaaccagagctcgcggactggcggggacaggtcccacctcctggctcccaggacgggtctgcaccaacctcagtttcggggctgcggctcacagaagtctaacctgcccgggacgcccgcaccaactcctgcgcgcggtgagtttctgggctctcgagagcgctggactcccggcggaaaggaggctgccccggctgcagctccgggggctccgggggctccaggggctccaggactcggttctcaccgcaagggctcctgcggggcccatcaacttcgccgctgggacgccgggctcggggtacgggtccggagttctttggagcaattgaggctgaacctggccaggggtcatcaggctaaatgaccgcagcgccaggactggcccgccgaggatctggccggccgcggtggtagggcccttacggagctggcgccaacctgtggggtgggcactgctggcccggcttatggaagagaaaactgaggctcgataagagaaagggaccagcgaaggcgacgcgatgatttgtgactggggactacctgtttcctgggcccctcgaccccattctgtgacagggaaaggtcttccctgattggccaaatctgggggcctggcacgagggcctcttgtgattggaggggtcgacgtgagcgctcaggggctgcgctggagtcccagctccagccactgcgctcaagtggacggtcgcgcgtgcagagggaggccggatagcagaccccacaacgtggctcctggggccccgctatcgagagctcaggccccgcgggcacttgcctaggagaggaaagaatcttcccaaagtgcagacagagacggaatttaatcaggagtcccagacttggagtttggaggcatgggctctggtgtcaggtgactttgtttcctccccacgcctccacttctccttgaccttgggcaagtttcttgtgttctgaatcttag

SEQ ID NO: 168 - DNA, 6000 bp, Homo sapiens
gcaactgtttgccagtttgtgaaattaaatctttttttttttttttttgagacagtctcactttgtcgccgctggagtgcaatggcgcgatctcggctcactgcaacctccacctcccgggttcaagcgattctcctgcctcagcctcctcagtagttgggattacaggcgcgtaccaccacgcccgggaaatttttgtatttttaagtagagacggggttttgccatgttggccagcctggtctcgaacttccggactcaagtgatctgcccatctcagcatcccaaagtgctgggattacaggcatgagccaccacgcctggcctgaaattaaaatttttaaataattggagaaatggtcccaataaagcagagtaagagcaaaatccacctaatacaattggttaaagaagccacttgtgtaatcctagcattttgagaagccaaggcgggtgcactgcctgagctcaggagttcaagaccagcctggccaacacggcaaaacccatctctacaaaaaatataaaaattagcctgtagtcctagcaacttgagaggctgaggaaggaggatcacttgaacccaggaagtcatggctgcagtgatctgagatcgtgccactgcactccagcctgcgtgatagagtaaaaccgtgtctcaaaaaaaaaaaaagccacttgtctctgaaacacttttaaattttgctttgaaatcaaatcctttcattgtattagtaccacagtatgtggctctaggtatttgcacacatggaactctgcaccttccatctgtaaagatgaccggtagaaatggcagagctaagggacaaaagtctgaggctggtggagacttaatcaccttaatcagtgattacgacggtggggaatgcaactcacttccagacattctagaatctttggaatccacagtgctctgcaggaggaagcaggagcctcttgaaaaacttaccaccaaacttcatggaatcaccctggccttcttcaacaaaaacctctttaacagcactaaaacacagctaaaaggtaaccttttcatgtaggatggtttatttggtagtgtttggttgtgcaccagagaggatggaaggagttgtttcatagcctttcaaacaagaccagcattgtcaaacatttgctgtttcttctgctattcccctattcccttctgccctcaaaagatgtttaaaattttcagggccatgatgttgccccattttgctaccacgcttcttttttcttgatcttttgtttcaatgtctgctttctttcccctgtgtgctcactgaagcctgattgtggggtcaagctataattagtttatatatgaagtttaattcactgtggcttttttggcattagactcaaatgggctttgatgtctggctggggctttgatcccagaccctcgaatggtggtcatctctccagctcaaaggattgccctttactcttttcctcctattcggagacagcttttcccaattacatcatttgtgtttgtttggccataaaagctgcaaggcatcattttgttgctttgcttgatggcaaaatgtgcaactgatgccccttactttgcttggctgcaatagaatgttcaccgctggacaaggcatttgtagaatgatgctcagactttggtgggggtgctgttaggagctgttctgcctaaggacaaagcatcagactgtgtgatatgagggacatgttctggctctgcccaggaaagatcttcaagcataagttaacaccactgtaatatattcagccaagactctttttcatgctggcaactttatcttactctccagatcatccaggcagcaggtccaccccatcgttagtggtacactttctgagtgtcaattaacagtttttctgagcagacaggcgtgtccagggaaagcaaaagaaccaactagggctgaacaacattagaaaggagataatgaaatagcactagtggaggaagaagtaccagcacctgctttaaaaagaaagggaaagaaaaatcaaaacagtagggggaagtgagattccgttggcaacagaagggagcagtaggcgatcactttcaactgcttccggaatacctgcaacaaaaacaaagaatcaaagaggaaagaaaatccaggcaactagactggaggggagaaaatttggctgctagcttaaaaagagaataggggcaacccagcctgtctcacttaatctgatgacattgggagttttcctggaaaaacaattacagcattgagctccttgcttctaacttcatttgacagcctgagtttgttttaattggcatgtgaatgaacagcattatttattaatgtgtaatggatactttggaaagcataaccttttttcctattcgtgaccattttattggcggaaccatctgaatatattagttttaatatttaaacttgctgagaacactttttcatggagatatacaagctgttacggcaaatggcttgctttggactaatgagccagctcaaagtggcatttggtgaggaggggggttgggagggtggggaggtttggagacatagcgagcttgtctgcctgacttaagatttattagtagtgtgtaaaaatgtgtttcagctttttttccccctcaactatacaaatatagttgtcgatgtgtgacataacacaggccacaataatagactccacccagtcagaggaatctaattcagagctggaaagcaagaagcttgtttagaaatgagcagaatgaaacaatgacagaggacatgggtgagtggcatttggcaagcaggataagtcactatcctttcgtgccttactaaaattagggaggaaaattagttcctatattataaagtagtgtttggcaacagcaggcataaagaatagataacctgaagagaatcgattttgtatgcttatgaacacctgaccataattccatttttagagctaatatacaaccttgttaattatgaatcaagtttgtagttctttcatgtctgtgggaggcagcaatggggaggaaagtgaaaggtggcaagggagttcttttgtttttgttttttggtaaatgtcaacttaattctatttgtagtagagattaaatgggtactattaagtttaaaagtatgctaatgaaaaaacaatttacaaccaatctacattctcgagtctctctctagcaattgtcaggtgaatgcttgcaaggtaatgtgctgaatacagcgatactaagagggtattaaaacagtccctgccttcaggaagctttcataatgtagatggagagaagagatacacataaacacctacgtagatagatatgcgtgtgcacacccagataaataaccatacaggtagcatgggatcagaatcagatatttatatagttaactggagctcaaaggttggaagggtggttagaccacacagagaggggaggaaagaagaggaattcctagcacgggtaagcagatgggcaaaagtgcaagtgtctgaaataatgatataggatgcactctttcacacaacactttgcctgaacttcagcaattgtgacttgctggattgaatttccgaggttcttggatgtactgcttttaaagatatatgtggtacttttccacagataagccagctagtggaattttcagacccctatcccaccggaaatttcagtgggataggggtctggagtagtgtgttccaagcagagatgaccaatacatgatacttcaagagggaagacttataaatccctctggagaaaagctacaactcatatcacctttactatctatgtgctagccacgttgtaagtgcacagcccccacaatatatagcatatgctgcatactattataattcttcaacagcaggttcccatagcagctgctcccttttacagtggggggaacgtacacagagaagggagtaagttgcccgcacagctatttaggggtgaaactgggatacaaatccagacagtctgatttctgagtcagagctcttattgtaaacgcagactaagtaataataaaagctcaaacaaaaaccaaagcgcgcacgcgcgcgcactcaaatcgtaggcttgtaaaagaattgatgcaacctctcgctatacaacgacatcctcctgcctaattttaaatgccgtccatcgtaagaccgacgttaaaaaattaaaacgacaacaaaacttaagttttagaacactgcattgtgctctgtattgcttgcctttacaaagtggagttaaggaaccaaccccacagtgtctgtgaatacacttgcaataccttgcttgggaagtgaaagaaacctaactcggtgtgagtggaaatgaggagtggccgtgtggggaaagggttaagactgtgctgcaacttggtcgagtttcagaaagttctccggagagcccaactgccgcgtcccgtcgcggcccctgcctgcgcggccgactgtaacaggatgctggggctccaggcgctcgccccgagctttgggcgacgagaaagagccaatgaggagcgagggcaaaatcgggtgcagtaaacccgaaaagggggcgaggaggcccgcgaagagagcgggggaggaggcggggaggggcgaggaggggcggggagggccgagcgaggaggaggcggctctgggggccgggcggcgcgcctgacagaggaggggaagcctgggggcgcaagcgtcgcagccgaggggccggcgcggggaggcgggcgccaggcgggggtttgcagggccgccgcgcgtgacgtagcgccgggcagggcgttatcagctgccgggccgcggcgagggacgcgcggcgacagcggacggcgctgcccgggccgggacagcagcagccggcggtcgcgcgcaggactcgagggcttctagccaccgtccccgccagcgccgcgccccgccacagggcggcatgagcccacccgcggccgcagccctagcgccctgctcctccgcctgggcggcccggctgcggtgacggctctcgctgcccgactgggggccatgaagccgagtccggccgggacggcgaaggagctggagcctccggcgccggcccgaggcgagcagcgcacggcggagcccgaggggcgctggcgggagaagggcgaggcagacaccgagcggcagcgcacccgggagcggcaggaggccacgctggccgggctggcggagctggagtacctgcgccagcgccaagagctgctggtcaggggcgccctgcgcggcgccgggggtgcgggagccgctgcgccccgcgctggggagctactgggggaggcggcgcagcgcagtcgcctggaggagaagttcttggaggagaacatcttgctgctaagaaagcaattggtaggtcgtgcccgaaggtggagcacggctgttcctgcccaggggctggaggtcgggcaggtggcctggggcgggcgcgaggttgactctggctggggagatgctcgctgttatgggacgcccccgaccgccccatacctccctgatccccttcctgagtgcccgcggcgtgtgggctgccgacgcccacgcgtttctggcgtgtgcccgctttgtgtctggcgacctcgcgcggattgcgggaagggggtggccgctcttccctcctcctctgccttcgggattcttggagtcgcctagttctaacgttcggtctccttagttagatgagtatatgccctctccccagcggtttgcaaactcccacttaaaataccattttatttggaggttttcttgactttatctcctcccgccgagaggggccaaaagccaaggagggggtttgtggcgtgcttaactgtccagggccgagttttacgattacactggagcgcctgtagggagccgtgcctctccgagagctctccccagcatgccagctttcacccaggctggtgcttaatttcaaatagaagccctttgtataaggca

SEQ ID NO: 169 - DNA, 6000 bp, Homo sapiens
ggtctttaactcctggacccaagtgatccacctgcctcagcctcccaaagtgctgggattacaggcatgagccattgcgcccagccctaaagtaattgaagataagaaggaaggacttctaacatttgctacttgttttttgtatgtctttgtattagtcatggttttctggagaacagaagtaatgtgatgcatatatatgatatatatttataaacatgaatatatgttaaatatataaatatacagaatatgtacaaaaatatgtttatacttataaacatatatgtacaatttatgtttatatttatagactatatatgtaaaatatataaaaatgtatatgcttatataaaattattttatatatccatataaacataatatatgtaaactatatttatatttatttacatataaaattatatataaacctatattttcaataaatacataaaaagaaatatataaatatatttacatctctctatattgtatacaatatatctttatatataggctgggtgctgtggttcatacctgtaattccagtcctttggaaggctgaagcagtaggctgcttgagaccaggagtttgagaccagcctaggcaacatagtgagaccctgactctacaaaaaatttaaaaattagatgagtgtggtggcaaggacctatagtcttagctacttgggaggctcagggaggaggactgcttgagcccaggagtttaaggctgcagtgagctgtgattgtgctgctgtactatagcctgggtaacagagggagaccctgtctctaaaaaaaagtacatatatgaatgtgtgtgtgtgtatatatacatatatatatatgtatatataatttttttttttttttttttttttttttttttttagagatggagtttcactcttattgcttaggctggagtgcaatggtgcaatctcggctcactgcaacctccggctcccgggttcaagtgattctgctgcctcagcctcccaagtagctgggattataggcatgcgccaccatgcccggctaattttgtatttttagtagagatggggtttctccatgttggtcaggctggtcttgaactcccgacctcaggtgatctgccagcttggccccctgaagtgctgggattacaggcgtgcttctactttcttatccctaagtaccatcttacctgtgggttttttggtaaaaattatttatccagttgagtaagttcccctctattcgttagtttacagagagttttaatcatgcatgggtgttggagtttgttaaatgcttttttttgttgcatctattgatcatgcgatttttcttctttagcctattgatttgatggattacattcattgattttctgatgtggaacaagcctttcatatctgggataaatcccactggttgtggtatatagctctttttatacattgtttgatttgatttgctaatattttgttgagaattgttgcaactatattcatggaagatataggcttatagtgttttgttttgtagtttgtttttcagtaatgtctttgtctggttttaatattagggtaatggcctcatagaaagaattgagaagtacttccccatgttaattttctggaagaacttctttagaattggtattatttcttccttaaatgtttggtagaatttcttagttaagccatccaggcctggggtctccttcatggaaaggttttgttttgtttttgtttttttgagatggagttttgctcttgttgcccaggctgagtgcaatggtgctaactccactcaccgcaacctctgcctcctgggttcaaacgattctcctgcctcagcctcccaagtagctgggattacagacgtgtgccaccacggctggctaattttgtatttttagtagagacgggttttctccatgttggtcaggctggtcttgaactcctgacctctggtgatcagcctgccttggcctcccaaagcactgggattacaggcgtgagccaccacgcccaacccatggaaacgtttttaactacaaattcaatttatttaatagatgtaggactttttgtgttgtcttaaaagtgagctttggtaacttgtatttcacaaggaatttgtatagttcattgttcaaattcattggcgtatattctattttcattttaatatatgtagaatgtgaagtcatgtcaactttctcattcttggtattggtaatttgtgtcttttttttttttttttgagatggagtctcgcattccaggctagagtgcagtggcgcgatcttggctcactgcaatctctgactcccaggttcaagttattctcctatctcagcctcccgaatagctgggactacaggtgcttgccaccatgcccggctaatttttgtattttttttttttttagtagagatggggtttctttgttcctttttttttttttttttgagatggaatctcgctctgtcacccaggctggagtgcagtgacacaatcttggctcactgcaacctccgcctcctgggttcaagcgattcttctgcttctgcctcagcctcctgagtacctgggactacaggcgcacgccaccacacccagctaatttttgtatttttagtagagacggggtttcaccatattggccaggctggtattgaactcctgaactcgtgatccgcccacctcagcctcccaaagtgctgggattacaggcgtgagccaccttgcccggcctctctctctcttactttctttctctttctttctctctctctctctcctttctttctctcactctctttccttccttgtttctttttctttctttttttggcctgcttgctggtctcaaactcctgacctcaggtgatctgcctgccttggcctcccaaagtgttgggattacaggcatgagccaccgtgctgggccaatttgtgtcattttcttttttcctgattgctctgactattgatcttctcaaagaacacactttgatttcattcatttctctatgtcttttagtttttaattttattgatttttacttttatcttctttctgttctttggttttacttcattttctgtctagttttttcttttttgaagccgaggtctttgttttgcccaggcttgtctggaactcttgggctcaagtgatcctctcacctcagcctatttctgatactgatttctaatttaatttcattgtggatagaaaatatgttttatatgacttgactcctcttaatatttttatggcctacaatatggtttattttgataagtgctctgtgaaaacttgaaaataatgtgtattctgttgttatgagtagttttctataaatgtctatttgatttagttggttgtgtttaagtcttctatatacttactattttcctgtctaattgttctgtcaattatcaaaagaaggatttgaaatctccaaatataattggaagttgtggttctgtcagtctttgctccatgtattttaagcttctgttaatgggaacaaagatgtttagggttgttatgtcctactgatgaactgacccctttataataataataataataataataataataataataattctcttggccagatgtgggtggctcacatctgtaatcccagcactttgggaggctgagtcaggaggattgcttaaagccaggagtttgagactagcctgggcaacaaagtgagacttcaactctacacaaaataaaaaaagtcgagtgtggtcgagcgtgtgtggtcccagctacttgggaggctgaggcaggaggatcccttgagcccaggagttagaggctgcagtgagctacgattgcaccatggcattccagcctaagtgacagactgagaccctgtctctggaaaagaaacccgatcctcttcatccttagtgatattcttttccctgcaattaattttctttggaatttccttgccctaaaatctatttgtctactcagttttcttttgtgtgagcatggtatgatggtgtatctggtatatctttttgttattgttttactgccactggggtaatcacaggactcacctggttttgtctcctgtctctcaaggattactgtcctttgcctgaggtccagcgtcgccagcctgggcgacagagcgagagcccgtctcagaaaaacccccaagtcccccacctcagttcaaagacctctcctttttcctccgctgtcacggtacaggaaacaatgtgtagtttccactacctggaagactcgacttgctctccgagaaccagttccccgacagggttcctagagcgcaggctgcacggcacagccccaacattccctgctgcttgtgaatcttcgcatcgccctcccaggggtcaggaatgtgtgcttcggtgtctccagagcctagcaccaccccatgactcagctggcgctcggagggtccttccatctgccgccgctggggccttcgctacttccccctcgctcctactggctggcccacccggctgcccaggctcggaagcccaggatcccagtcacgcgtctccccttagtccccgcctccagccacgccccccacacccctccgtcggccccgcctccagctcctgctcgctctcctagtccttcctcggccccacctccagccacgccccccacgtgcgccatcagccccgcccccagctctcgctcgccctcccgagtcctccctcggcccggtccccgcctctagctcccccttgccctccagggtccttctcggccccgcctcctgccgcgcccccaacgctgctccgtcggcccccgcctccggtcccgcccccatgctcctcccatttggtcctgtcttctgcactggcggaggtcgcggcgggcctcggagaggagacgccgacgtcagcgcgccggggcggggctggcggcaggagacgccgcgttgagagcttgggctcctccgtgagccgccggcgcgcttcgctgcctggcggcctttccccgagccgagcccgcttcccgaggccgccagtcgtcgcctgcccgcgcctgcgcagcgtcccgggccgagagggccacggcggcggccatggcgcaccgctgtttgcggctgtggggccggggcggctgctggccccgcggcctacagcagctcctcgtgcctggcggcgtgggcccgggcgagcagccctgcctccggacggtgagtcctacctgggcgcccggcgccctccaccctgcctcgggcccacttccggctcgggagagcggacgtcaaggtcactggcccccgccctccggccgcacgcgggccgtccctgccgagggcctgggcgccctgcgctgtctctcagccggccccgggagcgccgattcgcgctcagccctgcctgtgggattcaagttttgaaaacgcgcagcttcagtagagccgggttttcgcgcttcaccggggcggttgaagcctcgaaggtcatgttggcttggtggccgtccttgtccccgctttcgtgtccccggagcacggaacgaaggcgtctgtaattttgagtcagcagcacgagcacgatgtagtcgcaaggacgggttttggagtcgggctgcctaacctctccgagtctccgtgttcccgtctgttgaatggggccattgcgggcattccaggactggcagtattagctattattattaagaatgtcaccttttcatagcagggactctgtgttcgttgcatatcagggcctgctctcagcaggaggctctttctctgttggtagccatccctctagatacacacacgggacctgatacgtgtttctgacataatgatagagtgttgacagaaccatggccgtgatcagtctcaatgaaaggttcacgtgtcgaatagtcgctctcactgtttaagtgacacggttcctcagccttgcactggtgtacgggtggtggttgaggtccccgggtcggccacgggaa

SEQ ID NO: 170 - DNA, 6000 bp, Homo sapiens
tgatccacccaccttggcctcccaaagtgctgggattacaggtgtgagccactgaacccagccttttttttttttttttttttgtatttttagtagaaaaataaaaagtacaatgtgctgcacacatcgggggttttgctgtgttacccaggctggtctccaactcctgggctcaagcattctgcctgccttggccttccaaagttgctgggattacagacgtgagccgccttgcctggccttgagctgggttttgaaggatgcgtaggagtaggagtttgctaggagaaggaagtgaattctagagagaaactagctgttcttttgaggactgtccctagccctggttcttttttttttttttgagactgagtctcattctgtcacccaggctggagtgcagtggcgcaatctcggctcactgcaagctccgcctcctgggttcacgccattctcctgcctcagcctcccgagtagctgggactacaggtgcccgccaccacggccggctaattttttgtatttttagtagagacagggtttcaccattcacaggatggtctcgatctcctgacctcgtgatccgccccaccttggcctcccaaagtgctgggattacaggcgtgagccaccatgcccggtccctagccctggttctatttgtggaccaaatcataatgacagtagtagcaatggctaatgtttatgtgtttataggccaacattcttttatgggccaagattctttttttttttttttttttgagatggagttttgctcttgttgcccaggctggagtgcaatggcgccatctcagctcaccacaacctccgcctcccgggttcaagcgattctcctgcctcagcctcccgagtagctgggattataggcatgtgccaccgcgcctggctgattttgtatttttagtagagacggggtttctccatgttggtcaggctggtctcgaactcccgacctcaggtgacctgcccgcctctgcctcccaaagtgctgggattacaggcgtgagccaccacaccgggccttttttttttttttttgtacaaggggagggagggtggggagatatgggccaatattttattctaagctgtttaacttatattaactcatttaatctggagaacactcttaaaaagtagaaaatattaccccagaaagtggtggagctggtatacaaaaccgcgtaggtgctttgttaaggaatgatgcattagtttcccggtaggaggtgagtgcttcattcatccattcattcatgtctgcatctgttcaactagtatttacagagcatctaccatgggcacatagaagggaacacaccagccaaggttagtcaagtacacagattaacaaataatgacaggctgcattaactgcttggaagaaaatcataaggatgataggccgggtgccgtggctcacacctgtaatctcagcactttgggaggctgaggtgggcggatcacctgaagtcaggagttcgagaccaacctggccaacatagtgaaaacccgtctctactaaaaatacaaaaattagctgggcacgatggatcatgcctgttatcccagcactttgggaggccgaggcgggtggatcacgaggtcaggagttcgagaccagcctggccagcatggtgaaaccctgtctctactaaaagtacaaaaaattagccaggcatggtggcacgcacctggagtcccagctacttcggaggctgaggcaggaaaattgcttgaacctggcaggtggaggttgcagtgagccgagattgcgccattgcactccagcctgagtgacagagtgagacctctgtctcaaaaaaaaaaaaaaaaaaaaaaaaaaaggaaaaaaaggaaaaattagctgggtgtagtggtgcatgcctgtaatcccagctactcttgcgaggctgaggcaggagaatcgagatggcgccactgcactccggcttgggtgacagagtgagattccgcctaaaaaattaaataaataaataaggatgatgagatggagggcagttgggaggggctcgagctgaggaccacactaggtaaccatgagcagagagggggaactgagcttgagacccccagaggataagaaattaagaaaagccaggaaggctgggcgcagtggcccacacccgtaatcccagcactttgggaggccagcgtgggtgaatctcttgagcccaggagttcaagaccagcttgggcaacatagcaagactcccccctctataaaaaatactaaaacttagctgggcatggtggctcgtgcttgtagtcccagctacttgagaggctgaggtggaaggattgcttgagccaggaggttgaggctgcagtgagctgtgactgcacctctgcagtcccacctgggtgatagagtaagaccctgtctcgaaagaaaaacaaaaatagaaaagctgggaaaagttccaagcagaggcaagagcaagtgcaaagccccagaaatgggaagacatttagagactagcagatcaatgtggctggagatgaaggagctcagggtggggagtagggctgaacatggcatgggagtgaggatggaggatgggggtgaggctggagaggtgggggcggggcagggggtgtggggtgagggatgagggtttgagtgtggggaggtgggggtgagggtgaagaggtgagaatgggctcatgagggtcagggtgatctacgggacactagtctagagatgccaaggatgccactggctgtacctgtggggagtccagggaggggtagaggctgcacacattggcctggggagtcatatttaaagggaagagcatgtgggtcttgtctaaagatcaagtgtagataaggacgggaggaggctgggtgtgatggctcccgcctgtaatcctagcactttgggaggctgaggcaggaagattgctttagcccaggagttctagatcagcctgggcaacatagccatagtgagacaccaactctctacaacagcaaaacaaaacaaaacaaaaaaacatgcagctgggcatggtggtgcacacctgtggtcctagctactcaggaggctgaggtgggaggattgctggagcctaggatgtcaaggcttcagtgagccgtattcgcaccactgcactccagcctgggcaacagagcgagagcctgtctcagaaaaaaaaaaaaaaaaaagaaagaaaaaggaaagaacaataaaagtcaactgctgagagggaggtttaggaagaaggggctggcattatgactgaggtgtgaaatagtcttttgggccaggtgcagtgccttatgcctgtaatcccagcaatttgggaggccaaggtgggaggatcacttgagcccaggagtttgaggctgcagtaagctatgatcacaccactgcactccagccttggtgacagagcaagaccctgtctctattaaaaacaacaagaaagggaaatagtcccttgggggagagatttaggattgtcagtagccctgagggctcgcttagggtccgttatcagccagggtccagtcaaaagacaacacattatagtttttaactgagagaatttaatataaaggattgttaactaggtataaagatgtgtttaggtaactgtcggggtataatactaacagtagcaactgcaggaagtagctaccactggtaggtggtattattaaaatgtagatgcttgaggaggggcacagggaggtgaaactcagacatctgaggagagggtgctgctctgctagggctggtgtctctgaggagaaaacgaggctggttctgcaaatgttggaataagtgcagactggattccactgctgcttccagaatgttccaactgccacctccaggataaagaagcaagagtggatgacaccagacaggacaggagcaagcaggaagcaaagccccctattgatagagccaaaccgggatcagctggaaagcagaagtgtttgcagaggcccagcctgatcattatagagccaagaacagcagctggctttggagcttggtcaaccggcttgaggcctgagttgaaagctagacccatcagcacagtctcttctggtgattggacttttgctaggtgagtacactgaagccaggtaaagggagtggagagtgtgtgtgccactgagtgatttacaattcaggatcctggaatataattccgtgaggacgcagcgggtgactgggtgcaaagtagcccagttcaagggacctgtgggcctggggatgaggacctttgcttctccacatgcggtccatggactcgcagcatcagcatcgtctgagagcttgtgagaaatgcagaatttcaggccactgagaccgctggaattggaatctgcattttccagatctcctggtggtcctcaactacttactggtttgggatgggaaactagaaggcttgggctgggaaactagggagtggtgatcagcgagggggcggcctggctacagcaaaaaggacaggcactgggagacagcccctgggcatgagcttccaagctggggctttttgaggaagccatagtggtctggcattgggacctctgaacgaaatttcccggtggctacaaggaattttcccacttccccaaattagtagattcgatttccatcccactagctggtaatttacagtatagtgaatttccttatttcttttttcttcccaagactttcaaaaagtaaagccaacccctttatttatctttgggctcgtccagtctggcttcccccctccgatcgttcgcagtgggacagcccgccgggcctccttccttccccagaaaccctccaggcctgggagaggacgcgttttgcattcaggaaaaaccaatcgctcccctatcgtacataaccaagagaaaaggtggcggacgaggggcgtggcaaagtgattagtgcggcctggaccctgcgtgccttgcgcgctgcgggctctttgcgtctgcgtagttcgctcacctccctttctaactccgctgccgccatggctcctgtggttagtatggctccgcgtgaggcctcggctccaggggaggcacgtgggcctcgccgagcccggcatctacccaggctcgctggggacggcgccctgcagcgtcctgctggggtgggctggcaggtcggccggagcgggccagagcccctgccgatcccagcacgttgtaggcggaggaggccgcggcccgaggctcgtgagggagatccgggaggtctcggaggcccggggccccagctaggggctagcggggagctggagcctggagactgcggtctgggccggccactggtcctcggaccccggccgggggcctgattacctgggtggagggcggggaagaagaacgggacctgctaccctggggagccgcgcattcggaagtccacggccaagactcggggacgaatccgcggaagggcggcttggtcggcgtgctttcggagaggaggcctgggtttgaggagctttttagcgtccccagaggaaattagtttatcagggcgcactgtacagacccaaacgggtgttgcagtggtgtagggagaaggctctcattgcattctcctttagctatgctgggactgggctgtgcggcgccctcctcctaggttatttgagaaagttgtttttccgtgttcttcgtcccaagatcctacttttcctcttttgttgggactccctggttaacatttccggttcttctgctctttctgtctggttgggcttttgaatgccttttggtttaaaaccttgatggagaagtatcaagcccgttgtgggtaggtctcttgattgattgtgtgtgttcggaatagatcttaaagtacccctcttagattattactgcgaagagacgttgtaaaaaataaatcagtgatttttgtagtggccaaatgtttgaaaagttgatccagttaacacaagttttagatgaagttc

SEQ ID NO: 171 - DNA, 6000 bp, Homo sapiens
tgtgctcttcttctttgaaaagaggtgattaaatggcttatagaataggtgataggatatttagtcatttagaggtcactgactctaatttaacctgagttcttggcaaccacacatagataatactgaaatttgtttgcaaataattccctatggctacatattcccattttaatgtagctgttttttttaaatctccgtacatacaaaaatatgaacttaaattaaaattaccctttcttcttagttctaagcagccttagtaggatgctgagtaagggggaaacaacagcctatcaattgatgatgatgaccatatgtaaaataatcacttttctaatttaataaaacctccaaagttttgtccttggaagaaaaacctcccagtgaggaggaatagcaattgaagtaaacctggcccctcttctaagttttgtctgccttttatattttcaatcccattattcattcagcattccatcaagaaatactcactgagccctttccacataccagacacggataacaataacgaactagatagacaaggctccaccttcatacacatttttatctgggtataggaaaaagaaattaagcaattacaatatagtggtaatcattagggaagaaaagtagagggtgcagtggaagtacctagcaggatacctaccctagtacattggtgggaagagatataggggtgtggagtgggacatgtgagagagtctagaaaaagcttttttgtaactgacatctaagcgtaatgttaagatgtcagaaggtatttcaggcaaaaagaactccccgtacaaaggcctgaaggtaagtgagttacatttagaaacttagaagttcagcttggctgcagcatagcattggggtagtgtagccccaaaatggatacaattccctctgctgggcttccctgtaacagagttgacatggtggagaaattaaaaaataacaaagctttaggctctgacctcttgcacattatgctgcctgaaaacatttatgttccagatgcagaaggctaatcagtctggcaagaattctgaggttggaaaaacctgctttgaatcccagcttgagaccagtaatacccacaacaggttgtgtagaggttaggtgaaataataaatgtgaagcatcttacacacactaggtgctcaaataattctctcccttcagttaccttgcttctgagcccccagctggactctgagctgaggacaccatgtcaccatccaccacacatgaccccatgacttggcagaggacgatgcttttcttggccatctctatgtccatctcattcagttctagtctctaccctcttctttagaggaactgcagcattcataaaacaagaattatagccacacgcacctgagacttgttccattacactaattgtactttatatttgtatatgtacttgatctcaattattccttttgagaacatcataaggttgagtattgtaatcactatttggcagataaaagccctaggttcagagaggtacgtgatttatcttgactgaagctttgaatgtagctcctcattttctaaacgagttctgtcaaccctacaaaggctgcctcccagcaaatactgcaatgggcatatgttttaaggtatatttgcactttttttaaacttttaagttcaggggtacatgtgcaggtttggtacataggtaaacttgtgttatgggggtttgtacagattatttcatcacccaggtattaagcctagtacccacattagttatttttcctgatcctctccctcctcccaccctccaccctccaataggccccagtgtgtgttgttcccctctatgtgtccatgtgttctcatcatttagctcccacttataagtgagaacatgcaatatttcgttttctgttcctgtgttagtttacttgcagtttcttttaaaagttattaagactcagagaaacataaacttttacaactatatacctattcatcaatatacaactgtataactatatactctttcacacatattttaagttctctgtgtaaaactaaagttggggggtggtagtggtggcaggatgttctcagaatactagggccttcaaaggaccatcctcaatactttgatgataggtatcactttccatttgcatacttgcccagctatgctcataacagtaaaaataaagcttcctaccttcttaagaataaaaaactgtctcccctgtgaaaataacacaagtgaaagacttaattattcaggtggacttcagctgctgatttcaaatggaattattctcttatgatcacaggatgccttgtaagttacctgtttcaagcccagtctctgcctagggaactgtctcctatgaaaaggagtccgggtggaccatggtggctcatgcctgtaataccagcatcttgggaggccaaaaagggaggatcgctggaggccaggagtttgagaccagccttgacaacaggaccagataatagaccccgtctctacaaaaaataaaaaaaaaattagctgggcatgatgactcacacatgtggtcctagctactcgggaggttgaggtgggaagatcacttgagcccaggagttccaggctgcagtgagctatggatgtgccactgcactccagcctgggtgacagagcaagacctcaactcaaaaaaaaaataaataaaaaagaaaaggagtccacctcacttctgaacagttcaagttgagtccataaatgagcctatttctgtcttccaaagatatccatataagacttttcccaaccaccccccgcaaccttgcttcctttcagtgtttctccaaaggtggtgcccagattacctggatcaaaatcaccagggtactgattaacaggagattcctgggtcccaacgctgacctgaatcatcaccaagaaatggtgcattcgcttttcatatcacattacccagcagattcatacttcgtgaattacacactctagatctctgtcacacaaaaaaaatggtcttaggcaaaatctctcatcttctacttaaaacaactggttttaacctaaggggctgatataaatgctaagtcaagcagtgatttgtgtttaacacttgacagtccctcttccaggtactctatatagtggacttttatacaatatgatgtacagtccttcagccaaccaataatacacctaactacaatccattctacatttccggaaccatgctgttcatgaggatatcacttcagatattttgtggaaattttgaaattatggcatctacagaactccctgatatactagctattgtaagccaagccaaaaagcacatgaaggtagtttggtataattctttatctatcttgataattgaaattgtttcactgtaaaactttacataactgagctttgttttaaagcaaaaaacttgcagatgtgagacagtacgagaaaaaagaatcagctgttaccatcttaaaacttaggatagcctaggtgtggtggctcacagctgtaatcctagcactttgggagtacgaggcagattgcctgagctcaggagttcgagaccagcctgggcaacaccgtgaaacctcgtctctactaaaatacaaaaaaaaaaaaaattagctgggcgtggcggtgtgcacttgtagtcccagctacgggggaggctgaggcaggagaattgcttgaacccgagaggtggaggttgaggtgagccaagatcgcaccactgcactctactccagcctgggtgacagagtgagagactccgtctcaaaaaaaaaaaaaaaaaaaaaaaaaaaaaaaaaaaaaaaagaaaagaaaaaaaaccccaaaaaacttaggataaaatcttaaaacgttttgttcgacttaaatttaaattagcagtttaggatatagtacactgataatgtaattacatacattctgctataaaggcatagacatctttattgggagatatgggcagaaaaattatttcctcagggtggggcatttggctaaacacttgccaatatcctttactgtgtaatttaggtaacacaggcagaaaaggcgtttgaaaagcagaaatcaagtggcaaatatcagatctgagggacgcaatgagggtggagttgaaatccgtggtccttggatttgaaacttaccagcccgtgaacaaggttggtattgcttttggcataagacgacagcctttcttttcattagctcaggaggaatactggctttccaagtgagctcctccaatccagtgatatttgcacatctcacctgggcctttcggttacaaattcaccaccttaaggagccgtgtgaaaaagcaagaacaatcaataagaaggaaaaaaaaaaacccttcagctataaatcagccacgtggagctgctgcagcagcagcggtagtcccacttcctggttggcttcctgaaagcctctcgacaaggggctcagggaagtgggtctaagggagaggtgcagacgagagcgactccaggtccaacggagggggcggcgggccacgggatcccggagggcacaggcgttaaggacggagttattgtccataattacaataaaagtttggggatctgaaagctttaaggagctgagctgcagggcaaaggctaagaaccggactcgggaaaagtgcaagttagttacaaggtagcagggactgtgaagggggctcgcgtggagagcaggggactgcggatctggaagggggcaggtagagaggaaggcagcctggcagagcgaggcacacgggtcagtcggagctctgcggtggccgccagaggggagggggccacggggaggagcggagggaagagcccggggaaaggtgtagccgaggggagttccggatctggagctggaaagggcaggcagcggagagggcggcagccgtagcggtaggggtgggggaaagagggggaggagagccggaggagggggaaggagggaggggagagcggtggcggcggctgcgccgggctgtgagtctctcgccgccggaggaagatgaggctgaagattgggttcatcttacgcagtttgctggtggtgggaagcttcctggggctagtggtcctctggtcttccctgaccccgcggccggacgacccaagcccgctgagcaggatgagggtgagtgacccgcccggccccctccggcggcagcgaccggcaacttgttttgtttgcccgcgtgtggagggagcaggggcggcggggtcgcggcacggcgtgggcaccgcagctccgcaggtggtgctggcgcagcgcgggccgagggggtgccgagccccgcgcactccgacctccctggccgccgccggcccgccccctcgccgccccttcctccgctcttccccgccccgggctccgtcgccgacacccgcgctgccgcggcagcggctcgggcggccgctctccgcgccgggactgcgggcggagcgggcggagagccgggtccggggggctgcggccgcccggcgtcccgctctggggggccgggaccgcagcgctcacggcccggggacgcggggttggtccaggctgcggcctgtggcgcgtgcaggcctgaaggaggcgagatgccgatgccgccaccgctggtccggtggaccaggccccttggtccagcctcccctcccgcagccgcccgtctgggggtgttcgcagccccgggctcccccggcccgcccgccggggagtgggagggcgatggcgccccgcctccggctcttacggagagcgcgcctccccctcaactccggcggcggggagccggggtgcgatgcgcggccgaggcctcgcccggaccgccggtccccctcgcgtccctgggcgagggaggggcggttggccggagatggcggaggggcgtccccgccccgcctgcccgccgcccccagccctcagcgcctggggaagcccctgctgtggcagtgctcgggcgctat

SEQ ID NO: 172 - DNA, 6000 bp, Homo sapiens
cggcctcccaaagtgctgggattacaagcatgagccactgcacccggcctaggacaaccctttttagaagtttctctgtaacaaggagcagagaaataggccagtaggtggaggggtgtgtggaccaaggaaaagtttagttctgtgaacaatactattttcatctgatctaacatgtactgagggctttcttgagataggcactgtgtctggcacttgtgtttggtcttatctaatcctcacaacagccctaaaaggaagatactctaattacctccattttacagatggaggttacacaacttgtctgaggccatgagatactaagtggtggagccaagatttgaacccagctagaatgtgcctgtgtactggacatggtctgcatgaaaggcgaggtggctggtgcaggggtgaggggtccatgcaggggccacatccaaaaaggggagagggaagtttccagaaagaagagaggacacatctcccaccattaccagagggtcaaaggagaacaagagaccaggtgggtttgtagatttgctggggggagatgagggaacctttgctcgatgacttctaggtcctctggacaactagggagatggagacaggagatttgaggagaaatggtacaaaatctcaacttgctgattatgaaagcaagcttcgtgggggaatgtaagattgccaggcaggacggaatgtccaggtgaggtttgtggctggagacaagtgatataccaggcaagccctccgtgctcctgggcacaccatgcccttaggctacaagcagcctttgcttaggctggcttcgtagctaggaatgccctctcttctctgccctccctactcttcatgcccagatcagccttcctcccctctgtatagaccacttattttggcaattatccagacattcattcattcattgactcaacaggcattgaagacctactgtttgctaggggccaggctaggtgcccacagcaactaatatccagactcttttttttttttttttttttttttgagatggagtctcactctgtcgcccaggctggagtgtagtggcgcgatctcggcttactgcaagctccgcctcctgggttcatgccattctcctgcctcagcctcccaagtagctgggactacaggcgcccgccaccacgcctggctaatttttttttattttttagtagagacggggtttcaccgtgttagccaggatggtctcgatctcctgacctcgtgatccacccaactcggcctcccaaagtgctgggattacaggcgtgagccaccgcgcccagccggtcagacccatttttttttttgagatggagttttgctcttgttgccccagctggagtgcagtggcgccatctcggctcactgcagccttctcgggttcaagtgattctcctgcctcagtctcccgagtagctgggactacaggcgcctgccaccacgcctggctaattttttttttatgttttagtagagacggggtttcaccgtgttagccaggagcgtctcgatctcctgacctcgtgatccacccaccttggcctcccaaggtgctgggattacaggcgtgagccactgtgcccagcctcagaccaactcttaaggagtcactgtctaggagaggaaacaagcatataaatttgtaattacaggaacatacaaaaaaaattagccaggtttggtggcacatgcctgtaatcccagctactcaggaggctgaagcatgagaatcacttgaacccgggaggcggaggctgcagtgagccgagattgtgccactgcactccagcctgggtgacaagagtgagactccatctcaaaaaaaaatttgtaattacagtggaatatgacaagaacaataataaaagtggccaagatacctggcaacacaggggaagacagacatggctgtggagtcagggattctctccctgcatcgcaaggtgccgctgggccttgaagcaggagcgtaagacaagacaggcaaggggtcaagaatggtgggtgcaagcagaagcagcccctggggcaaaagccccgggtttgcccagagcatgatgaggctgggggactctaagttcagcgtggcagaagcagaaagtgctagaggagcgagatggggatgaggctggagacagaagccaggccacacggtggcatgtgggaactattctgaggtgagccatcggaaggaggaaggcgaggcgaggcgggcttacgtctgcatcttagagactcattctgtggctttgtgtagggaataaactggaggaagccagaatggaaacagggaatgctgtgaaaaccagacagaggcaccagatgggggagagaggggagagagctatttaggaggcaggatagataggaactggtgatcgattaatgatgtaggtaaaggagagggaggcttgaatatccccctggtggcaaaaccagaagccaaatgtggaaaacagacagtaaagcaagagtgggatgaggggggtcagctcagtgttggttgagatgagtttgaggggctattgctgttcagatggtgcagttggcagggtaaggaagggaaggaaacttcagggctggagactctgcagagcacaggttgtgggaacccattggtggaaataaaaatgcccagtgagcgttttttttgtttttttttttttttggagacagagtctagctctgttgcccaggctggagtgcagtggcatgatcttggttcactgcaacctccccatcccaggttcaagtaattctcctgcctcagcctcccatgtagctaggattacaggtgcctgccaccatgccctgctagtttttgtatttttagtagagacggggtttcaccttgttggccaggctggtctcgaactcccgacctcaggtgatccgcccaccttggcctctcaaaatgccgggatgacaggcgtgagccactgcacctggctgagcatgatgttttcaaggcacatctgtgccatagtgtgtatcagtacttcactctttttatggccaaataatattccattatatggatagacattttgttgatggacaattgggtttcattttattatttttagttgtactaattcagataatgtatgtttacatcctccatataaaagaagcaaataatatagatatccatgaagtaaaacattaaatcccctcacgcttctccttcagttctactcttctccccagaagtgactgcaggtgacaatctgccctgaatgtctctggccatatacattagattttttcacataacttcctagtcaactatgggcatcataggggatgggtcctcccttgcccggggtgatctatgtgtcttctgggtaaagtgggcgccgaatgttcatatgctcaatggatccctggggagtgtgggggagtcctgtagagagacgtttccttatctctgagcatccgtgttcaggtgtggacgggacagtgagtggctgggaggaagccagaatcaacagctccagccctctgcgctacaaccgccagatcggggagtttatagtcacccgggctgggctctactacctgtactgtcaggtaagccccatctggctgcatgggtaacgcagtaagagagtggcgaagggtttgccaggagagtgggggacaagctacagggctgggagggtgagttggggtttgggtgggatgggatgcctgcgtcgctgaggaaattggaaattgaggcgagggcaggcagaggcctggactcggcctgttgtccccaccccaggtgcactttgatgaggggaaggctgtctacctgaagctggacttgctggtggatggtgtgctggccctgcgctgcctggaggaattctcagccactgcggcgagttccctcgggccccagctccgcctctgccaggtgtctggtctgttggccctgcggccagggtcctccctgcggatccgcaccctcccctgggcccatctcaaggctgcccccttcctcacctacttcggactcttccaggttcactgaggggccctggtctccccgcagtcgtcccaggctgccggctcccctcgacagctctctgggcacccggtcccctctgccccaccctcagccgctctttgctccagacctgcccctccctctagaggctgcctgggcctgttcacgtgttttccatcccacataaatacagtattcccactcttatcttacaactcccccaccgcccactctccacctcactagctccccaatccctgaccctttgaggcccccagtgatctcgactcccccctggccacagacccccagggcattgtgttcactgtactctgtgggcaaggatgggtccagaagaccccacttcaggcactaagaggggctggacctggcggcaggaagccaaagagactgggcctaggccaggagttcccaaatgtgaggggcgagaaacaagacaagctcctcccttgagaattccctgtggatttttaaaacagatattatttttattattattgtgacaaaatgttgataaatggatattaaatagaataagtcatagtctctctctttattggggctcaggggacactctcagggtagctgggggccacgtgaaggggggcgttgcggagcggcacagctggaactccgggatgatgttcaggcttgggggcggggacctccatgcctccagcccccaggtgggagcagaggtaggaaggcacactgcccaggaaaaaaatcaatcctccgcccaaggtacagcagaagcggcctccttggcctaggaggcagacttcctcctgcggggaaatcccttcctggctgggaggagcaggggcccttcctcttggtggcctcggacattcagcaggtgctggcacaggccctggctgggaggtggggcgggcaggagccagcctggaggaggggctgagagtcagcaggcacacgggaacccggaaccctgtgtgctggggaggaatcccgcagtggccggggggcttgaggccgctgctttgtctcttcgtccagagccttatgtaagagcttttctcgggaaacaggaagtcctgcttgccaatttcagcacagggagtagtgcaggccttattccaacacacccggcccagccttaaccccagaactcagccagtttcttgcttccgtgcccctggttctcctccccatcgagcccacccctcctttcccaccttcagtcacccctagtgaactgccccagcgatctctgctgtgcttgaccccgagggtcttccaccctcgccctgaccctggacactgcccagcttggccccccatcctgctcctggcacaatgccctctagccagccaaccttccctcccccaaccctggggccgccccagggttcctgcgcactgcctgttcctcctgggtgtcactggcagccctgtccttcctagagggactggaacctaattctcctgaggctgagggagggtggagggtctcaaggcaacgctggccccacgacggagtgccaggagcactaacagtacccttagcttgctttcctcctccctcctttttattttcaagttcctttttatttctccttgcgtaacaaccttcttcccttctgcaccactgcccgtacccttacccgccccgccacctccttgctaccccactcttgaaaccacagctgttggcagggtccccagctcatgccagcctcatctcctttcttgctagcccccaaagggcctccaggcaacatggggggcccagtcagagagccggcactctcagttgccctctggttgagttggggggcagctctgggggccgtggcttgtgccatggctctgctgacccaacaaacagagctgcagagcctcaggagagaggtgagccggctgcaggggacaggaggcccctcccagaatggggaagggtatccctggcagagtctcccggagcaggt

SEQ ID NO: 173 - DNA, 6000 bp, Homo sapiens
gcccaggtttccagcctcccagctcttgcacacaggagcagcaggtggggaaacgccaggatctccaagcaccctgccaagtctgtggcacgcagtaggacctcagctgctcaggtcctttctgctctaacggatacctaagaggtgtcacgtttccctctaattttccacctctttgtgtgaagcgtgcattgccagtccctcccctaggcccctagccctaggggttttaaagtagagcgggaaagcccgaggatcctttcagcagcacagagcagagaccgcgctccccaggagggggatcggctggatgaggagggaccggctggggctgagcacgtcctccaacaggcgctgaccggtgtgaacaaaagtcagtaactcgggggccacaacggcgggagacgcgcgcggccgcggggacccaggtctgggcggggtcgccatatcggttccgggggcctcgagggaggtttgttcccgtttccgcgaggccctagggggcacttcttccttccaacgctgtcgactgcccagcaggggaaatcgcccttctcagtctttctcatttgaatacatgaaaatgcgagttgattttggcaaggcgatgctctcccgtggccagagggacggttttgtcgcccgcgggcgaggccgggtggggagcagctccggctccgacatccggctgcgggtgagctaggtccgcgcccggagcagctcagaaacccggcggcgctcaggcaggagtaggggaaaagacaaacccagtggctgtttttgtttgtttgcttcaataaaataagtgaaagccctgggtatgtttatgcgttgcttttacacacaaagacacacagacacaagcacacgcacacacagccggggttgaggcccgttacgggttaggactctgtacagaactgcctgcaaaggcccgtcaagtggtcccagggcccctacctactacagagttgtgaattaatcccttaaagatttaatgatggaaccaagggagagaggaaggaagatgaggaagaaaaataaaaggaaggcagcgaaggaacggagttcgaaccctggccaggcccatacttctctctcgcgggggaccgcagtctcgcggctccctggccccttccccagctcggcgcacacatccacctgcgaaggccaggcacacgcacgtgtgaccccttgtttccagcgtcccaggccttcctcacttctaagctgagccgtgtcccagttggggtcggctttgaaccgcgttaacgaccacaggtcttagtttcattgcatccgattctcccctgcagaaggaggacttaagcttcttatctgggtggggggtgggggcccgcggaggaactcgaaccactccacaccaagcatggctgggttgctgaagccgtcacctgacaacaaccccgtccagggaagggtaggcaaggaaagggggcaggcgagggacagccacagagggaagccctggagagactcgaatgggcaccgcagagccccgccggcccaggccctgctgtctgccaaccctgcggtcctgctaaataggaaggaccctgtcgccgcgagaggccgccgtctgggcccggggcccgaggcccgaggccgcggcctctccttccacctttcgccgtcgtctccctctgcttctacctgcctggtgaatatctgaggaaggggctcccagccagatcctgctgggaagtgtaagctgaggcagccaagcgtggtcaaaggaccgagtgccgctcaggtactgcgggactgcgccgggagcaggccccacgggtgtagcaagggcagcttccgggaagggcggagccgcttcctccgctggcggctacccggagtacccgcgcaccctacagtcctcactgccgcggatcccccacttgaggagcccgccctccccgcgacctggaccgccccaagctgtcgcagacccgtcttaaacacaggcaagtttaacccgggacaccgcaggagccgccacgtgcctgccctcgcgggtaccctgccccgagtccacccatcctccccacagctgaagacaggcctggtttcctccaacgagcagcacaatccttgcaaagcacagtttccaatggtgtaggtgcctatttgggaaaagaggttggaaaagagcaggctgcagccgctggacctggctaccgactggccagcaactcccagacagcagcattactttatgtatgtatgtatgcatttccaagtcaaagacccaacacgaccctgctgattcgcttttaaacctcagggaaagtgactggctggcatctgggtacactagaacctcacctcctaaatttgttaggtatcttgcaatgcggccactgagatggagagaggctgggagctggacgaacggccatctctccttccatcttggcctcggctctaagaacctaaatccctgactgggatgcgtgcggagttcaatccagtatcgcctggcggtgctccccggaggcgcctgcgggaaaattcagctttccctctccacgacaggaggcgctgttttcgtggaaatcccccggctgcgaacctgggatccctgacctggatcaagtctccgaagctggcagagtccattctgcatcaccggtcttgggctttgaagaagcctaggagaaattccgcttcggccatcacgctatgaaaagtggatttttttttcttaagtcaattttttttttttgaaaatatgagacttagtaggtttgggaagtgggctaaaagaacatttgatattgtaattgaccccccctttaaggtgacagtgtttttcccctacttaaagcgccaacttttttgtgcactataaaagctattactatccataaattgttactctcggtagaaaataacctagtcttgctcggtgttattgaagagccaagagggtattggagaatcacctccagaaggaacaaggaagctcattagcactgaaagtcccccggatcaggcccaggaagctaagcatccgtatactttacaaatggaactaaagtcagctactaatgggaactttgcacaaaagaattagtttctgacacacaattcgcagatacatttacacaaactgatgggacaacttgcagtcacaggagcaggctgcattagggagggttcctgccctactgagttccaggtggatttaatttcactcattcctttccttatgatgtgacgtttctacccccccaccctttttgtaaaaaaaaaaaaaaaaaatgtaatccaatgcttttatctttttttatttccttaactgcacatcttcaccctctctgctcccctgctgacttaagagatttgtttggttcagggatttaaagtgattctcttgccagatttcaagtaaaagagatttaaaagaacaaagcacagggaaaaaggtatctgtttggaagacaagttaaaacacatttcttaaaatgagattaataacattttaaaaactttgcaaaacaagaagattttgcggattcttaattactttagattttattttattgttacttaaggaaacctagtggttctacaggcagtacaacaaacacatggtcacagacactcagaaacacacacagtcacacatgctcagaaatatacaaacggtcacacactcaaaacacacgcaccatctcccaatctatcaccaactaattgcctatcacccggtcacttcagttgttctctctcccaggacaagtgggcaaccaccacccagggcctcatgagagtaaagagactttgcgttgggaagactctcccaccgacgtccaggaccgattaggaaccaagcgagcccctgagatctcagcccggaccctccgggtcacagacaggaccaagcgccgctgcgggcagtctcgggcttctgcctggcatctctttcgcagtgcagatgcgttcccgcgcccaggcccttgctctcccagctaacgcgcgtgttatgggagatgtcccctccccctgaccttttcctatcagaaaccagacggtcgtctccagctcactccctgaagcggctgaaggggggcgggaggaggagcccggcagggggaggacggcccgacttgggtccgcctgccctatcacacagacatctgctctcagtttcttcctctttgtggtcgctacagatgacaaggggagaggagcggaccgaggcggaacaaaaaaaaaaagttatgtcataaagatataaaccggtgctgtgactcacctgctcttagccgcaggtacgagtttcgtggcagcgcctccgctctgctagcccggggcccgggtcggcctaacgtcacttggctcggctgactcagatgacccggtttctagtgacgaagcaaaagtggggctttttcccttttctagtctgaagctctcaggaggaaagaaaaaaaaaagtctgtattctccagtctcccggggttgaactttgggtcaggaatcaggagggaggaagcaaagagcaggaggggcgcgagactgggccgcagcccgcgctcggaaggtggcgtgtacctctggggagggaccccggggtcagttatcccacaaggtctctaagcccagtctccgacgccaccgcccccggccttctccggctgcgaggttccgatccagagccctagcccgcccgcccgcctggccccgcctattttttctttttccaaagggggttacaccccctccctccccatttccctctttccctagcctccgggcctaaaccaattacactgctttgcaaacaaagtgagggccccgcttgggggaggggtcgcgggggaggggtcgcgcgcagcggtgaagcggcggggcgggaggcgcggcggccggactggcgggcggccgccttgcaggtgcacctcgggctttgtaggtgcgagcgtctttgtgcggcggacaaatggggagaggacgaggaggtgggcactcaagcgacgtaagatccacatcagctcaactgcacttgcctcgcagaggcagcccgctcacttcccgcggaggcgctccccggcgccgcgctccgcggcagccgcctgcccccggcgctgcccccgcccgccgcgccgccgccgccgccgcgcacgccgcgccccgcagctctgggcttcctcttcgcccgggtggcgttgggcccgcgcgggcgctcgggtgactgcagctgctcagctcccctcccccgccccgcgccgcgcggccgcccgtcgcttcgcacagggctggatggttgtattgggcagggtggctccaggatgttaggaactgtgaagatggaagggcatgaaaccagcgactggaacagctactacgcagacacgcaggaggtgagaggcaaggcgaggcgggcggccggtggggcgccgctggagcccgtgccgggggaggccggggagcggtgggcgccaggcaaggcaggcaggcgggccgggggcgccttctcggtgccaccgctgcccgcccgccggtgtggccccggccgggccttggccgggcctggaagcgggacctgctgccctgctctgtcccgactctcgcagccggagagggagttttaggaaactccgggctttgaaaacagcggctctaggaagcgcttgcctcttcccagcagcgagcgggagcaggagccgggcccggggtgcagcgggcgggcgagcgccggtgcgagttggaagcaactctgagaaagccggagcatacccacaaggcgacctcttcgtcccaccgtttaattcgcagacgtcttctgattaaagcgctctgccgccaagttgggtgtctcaataatgaaacgatttctaaattttgtaaaacttgttcttcaaaagccctatttggggagaagtgtgctccttctctaaaaccgctgggtggcgctagtgcgaccaaaatcttcttcacaactctgggccgagaacctgtttctcttcattgtcccct

SEQ ID NO: 174 - DNA, 6000 bp, Homo sapiens
aagatttatgaagagacaaaacataaaggccttttgaatatactcatagcttggatatccattttaattaagctgagcactcttttttttatcaggggtgagggtgaaggttagaattatataaatgtcaggccaggttaaaggattgggttatgtgcgggaattccctgcggtaatgagagggattttcatagaaagatcctaggtatgtttgatttgcaacaaatcagacatggagaaagggcataaacacaagcaatgccttcacccccagccactttccagagagggagaatggcagagatgatttgactggatggagcagtttttgaacgggtcacaggtggagaaggaggggaagcggggtttggggctgaaggcttgcgggcaggaggggctgccagggcagagggttcagatgggtgaggagcagatgcagagggatgagaatgcagagggggttcatctgcagggtcaaaaggagttttggaggaaggagttttgaaggaaggagtttcaggggaaggagagacctggggaaggttttcattaagaaggatttcatgaagggtgcaagcttgagacagagagggtcgggatctaaagtagaagaaagcctggcctgaatagagagaacctcttggcgtttgccattcctggttataaagttgtcattgtccctgagaatttgaaagtaaaaggtgccatatttgggccttcggctcgaaattttaacttgccattatttaatttgtacccgggccaggccatgttgcaataaaaatctgaacactttggctttatatttcctgtaagccaagttggtgaggttgtgaaggagacagcccagtggagaggatgtgggaatgcaggattgtttggtacccatgtggactggtaagaggaagccaagggtgtctgttttagttctaggcatccccagtcaaaaggcagagacccagaatcctctttataaagaggatggtcaagttgagaagaaactgggcatccccaagatttcttctagcttagtcccactggttctctgaagaccgggatggcagacctgactgtcccgagtaccatgagaaagaaaggggaaggcagatcttaccagttagctggattagtgtctgatgttggatgttccagctggaattggcaaagggcctcttggactggagccacaagaagtggggtggtggggagagaaagagagagacagagagagagagagagagatagagaggaggatgagggaggaggaggggagaaagcgaaatacctgatacccattgcaggcagtcagaggtggattcctgagacctgagggttttgagggctcactggagagtagccccagcccgagccttgcaggccctttcaggttagttgtcctcctcatgcaaattgctcaaaaagtaaagtgagagacaagatgggatgggtggccagagactctcaggatccagtgggatgagcagctgctgtccactgcttccttggttgcaagagagcctctatccccaacacccatcctggctttcagcaccaaatgtaagagttaaagaaagaggaaagaaacacaaaaagtggctcaacagtcaaaggtttattttggagaataaacctgagaggggcttctggccgattttttggtcagaagcattctgtcttacagactaggagtatttattggttttagggtgagacagcttatcacaagcttggaatatttctgtgtggggggggaagtttattgcagggttggaatgtctctggtcagaggagaggttatctcagggctggcatgtctctggttggggagggatttatcttatggttggaatgtttctggtccgagatgtcatttgtggtttatggtcatgctaaccttagccattaggctgatgccctttggatttaggtggtttttgatcaaggtgaactttaaaatggtggtgcttgtccaagatggtgatgctcctgtctgtcactcagggtagcagcagggcagctgcttggctgtggtctagacagtcagggaccacagctagctctgccaggcagaaaccctgatcaagctgaaaaagagtaaatattctcctttaatccactctgccttcctgcagtcatccctagagcagggagagaggatctacaaccatagagggttcaccttggaaccacaatcaccaatcacaacactaatgtgaagcaagagttatgcctgaactatcctcttccctgcttccaaaccacagatctgatggaaaagagctttcctacttaaatagagctggtgtggggaaaagagccactttatttcgaatgcgaatctgcctggttaaccccaagtcccaggagtgcctctaaaatgtctagttgggccaggcccagtggctaatgcctgtaatcccagcactttgggaggctgaggtgggtggatcacctgaggtcaggagttcaagaccagcctgaccaacatggtgaaaccctcgtctctactaaaaatacaaaattagccaggtgtggtggtgcatgcctataatcccagctacttaggaggcaggggcaggagaattgcttgaacccgggaggcagaggttgcagtgagccaagatcacaccactgcactccagcttgggcaatagagtgagactccatcttcaaagaaaaaaatgtctagttgtgtattactctttatgtatgaacacttattcattgtaagttttcttcttattgttgcagaaaccatagtttctgcctgtagcccctatgtattccttctagggtacatatgctttttgcccaagatatatgctctgggttgaggggttgtagtatagagatctacctgccttgtggtgtccaggaccacacttctaagttcccttaataaatcacccaataccaacaaactggatttgtctacctcctcctttggtttctcatcttcttcagcatttgggggtctctttgtgtatacaaccctttcacagaacagctggtgatacagggggtttgagggagccagcactggctttagagacacaactcctaggtgaaaatcctagccccattactggccacataagcttgaatgagtcatgaaagatctcataggctcagtcttcacatctgagaagtgcctgacagtgttattacaagagctgaatgaaggacgggaatgaatatggaagctctttgtaagcaaggaggtgttatacaaatgtctttttttacccccctacatgcacgtagtcggtacaacacttttctgattggtcttgtcaaagaggatctcttttccagtctggagctagaaaatagttatctacatttgttacattaaaactcccttctgagagactccctttctctgctggctgccaaggagctcagacctgaacttgggactcacctgcatcaaagttgtagatcacgctggcatttccttctactcttttccaagactcactttcccagactccgaaaaaaaaaaaaaaaaaaaaaaaaagcactggccatttttctttttttccctttttttgagatggagtcactctctgtcacctagactggagtgcagtgccatgatcccggctcactgcaacctctgccacctgggttcaagagattctcgtgttctcgtgccttagcctcccaagtagctgggattacaggtgtgtgcaatcaccccgggctaatttttgtatttttagtagagatggggtttcactatgttgcccaggctggtctcaaactcctggcctcaagtgatccacttgcctcagtttcccaaagtgctgggattacacacatgagacaccgcacccggccccattttgcatgcattttgcacgccatatttaaagattcttgccggtcgtggtggctcacacccgtaatcctagcactttgggaggccgagacaggacgattgcttgagcttaggagttcaaggccagcctgggcaacagagtgagacctcctctctacaaattattattattattttttaattagccaggtgcggtcgtgggtgcctgtagtcctagctactcggatggctgaggtgggagaatcatttgagcgctggaggtcgaggctatgagctatgattacactattgcactccaggctgggtgacagtttcaaaaaataaattcttgtatttgtggcagctgggtcattagaatacaatataatcatgcgtgagaggagccatgggaaacactgagcctggcttatgaaaaaggtcctgcaaatctaatttcatctgaagttcaacagactctttcttccaggcacacaggcgttatgtggccgcacgggtccctgcccgttagaaggattcagccacaccccagctttccagttcctggggtcttttgccaggacagtaggtgtggagtgcgtggtgaagtggagggtggaggtgggaccaaggccgaatttagggacccccagcatgagctgcgggtgggtcaaggccgcgaggttggagggcacggggacacagcatagcgaggaaggaacggtagggaccgtggtgatagactaggggtggacgcggggattgtgtttttctttaagcgggagagagaagcccgatcaccggcagcggaggagaaaagtccagggtagagatgggggcgctggtgtgggggcggtcaggagagaagggcgggggccgtcccaagcgtcctgcacctgccctactcgccgagaatttgcccgggtcggtgccagggcggggcagtcggcggcctggctgctaggctccgtgacatccggcagtctgagggcggcgggattcgggatgacttcgggcgggtgagtgtccccggggcagagcagagcgagaggtgaaacttcgggagcagggagcgccgcgggtcctttctggcgtctgcagagcgggcaggtgctggggacgcagacgccggagccagggagcgggcggttggagtcttaagtccaaccggttccccgcataggtggctgcagaggcgaggtgacggcgcgtgcggaacgaactctgcacccccaggaatggggagcgctggcttttccgtgggaaaattccacgtggaagtggcctctcgcggccgggaatgtgtctcggggacgcccgagtgtgggaatcggctcgggagtgcgggcttcggggctctctgcttggaactcagaggcgctgacccagcctggggcccgtttgctgcccacgggaggagccgccgtcaggggtatgtgagtgcccgggcgcggggactgcgggctgtggacagtcggggagcccggcggcttggtctcctccacagtccgcgcggagtcagggaaaagtcggttttcaaatccaggcgcccaccgcagggcagagtgagctgcggttgtgtggccccgcgtgctaaagagcctctacggagtgatataataattaacggggtaaagtacatttgaaagtctaaattaatttttataagctacgaagaaggatcagacatacatttggtattcttttatccgcaaagtttattttgtttgtattttccaaaactctaaaacaatcgctaaacattgacaaagaagtcatctcacaaaaatgcaataacatgtttgtgacatgacatcttgtaagcatgaaaaagaacacgtttggccgggcgcagtggctctcatctgtaatcccagcactttgggaggccgaggtgggcggatcacttgaggtcaggagttcaagaccagcctggccaacatggtgaaaccccgtctctactaaaaatacaaaaattagccgggtgtggtggcaagtgcctgtaatcccagctacttgggaggccgaagcaggagaatgacttgaacctggaagcagaggttgcagtgagccgagattgctccattgcactccagcctgggcgacagagggagactctgtctcaaaaacaaacaaacaaacaaaacaaacaaacaaacaaacaaaaagcagcaacacac

SEQ ID NO: 175 - DNA, 6000 bp, Homo sapiens
gaaaatatgtgaatgtgataagcttgattagcttagttgatttgaatatggtgttaatgaggccaacgtaatgggtttaaccctgtgaacccattattttcattatcctcaattgtcacagtttttgtccttaacagtggccagccattccataagtgcctcctgttagtcattagaaagacaaggtaagagagtaaagatagctggaaaaacagctcaaagcatgtgacctactgtgttggtaggttaaaagtaccagctttgaatatgaaggtcagcattgtgataacaacgtatcaatatttaattagaagtgaaagaaaacaacaggtgtgcagaatattgattttaagaagtagcttcatcaaatcccaattgttaagtcaccaagacaacttctgaaaacgttaaattaagggatttaaaaatattatttcattatgctataataattttttatatgcaaagatttcttttatggaaataatagtacttcattttggctcacagttcattattaaagattttctccctctctggtcataaggcaaatgaagttttctgagctaagtggatctgctagaatagtgggttcttggaaggaatactagtagagtagattcaaaagatggaaccagttggagaagggcttcataaaattaattttataaattttgcacttttatcctataggcaatggggaatttacttccatacattttgtgtatactacattatttcaatatgcatgactcagaatgtttggaacctgccatgtagtaggcatagtaggtatgaggtgggacacaaagctgtataagacacaattcccaatgtcaaccaactcaaattctgggaaaggagccaggtaaataaaaatcctaggtagatttttggccagtcaaaagagttaaagaaattattccctatttgttttaagggaatattccttctataaaggatgtggttatttactatatccacagtgaattactatggcaaaagaggtggtcctcagagcccatgaatgtaagttgagatgtgagtccttggatattaggtaagaaagctccacacaccttttctgacctccatgttgtatattttcttatgactaataggaaacatctcatttgtgcgaggttaaaaattacctcttggtttgaaaacaccagcagacaagctgcaggtccccaagatttatctcggttagtttattttttatttatgctattttctctgattgtattacttctgctttctttattcttcagtaaattcttgttcaaatcttctaaccttgtcttggctatcctacaagtatttaagaaagcttagttctttcacagttgccaaactttccctaaagtcattaagactgttttcagtggtaatcagcaaaataacttccagggagcagaggaatttcaaggttagattcagggctgtgtggtctacttaatcacttcatcagattattctccttctgtgttactctgcgtggaagatagctagctgtccctcagaattgtttctctaccccatagtaataaagctgcatcttggagttggcttcccagtaatctttgcagctaggtgtggcatgtaacaagtttttgacaattgcatgtgagctacagtgctatgttccactttaagaccaagacttttaacaagccatcatagctccttcatgcccttctgccagcttgatgtagttgagcagtcctttggagataaaatgtcccaagataaaaggaatcttaatctatggatcactcatagagaagaatggtctctgatctgaaattcccaccctggactgttacatgagaaaacacatacttctgtggattttgcattggtaaattttgaggtctatttatttcaacagaatatgctacctttttggagattctggataacaatgatgatcatgattatgttggaaagtagcagtactttaaagatatttgagagcagtacataaaatttatgctgagtggggatactttttttgggtgatgctcaagttgggattaaaaaaaaagtcccatcaggatagctatgaaacctttgaactctctcctagctaagattttaaaaaatcataaagcagggtaaaggcacaaaccacttccaggtaattggaagctgtaatgggcattttgcagagaaaacaatctcactttttcgtatatcatataaaactgtggacttaaagagagttaacagagaactgagtgttctcaggtattattatcaaaaccctgatatatcattttaaagaagacaaacatagactaatgtgagacatggtgcatatatgtatctacactagtataaaaaattaatggatatgagatagatgagaaaaaagatttcccttgatcatatttggctaagtatgcaatcaattccctagtggaaaggaaacagaatgctatatcagagccatgaggtatattgtttataatttcttttataaatttaattgatcccatatcaactaggggcctacaatcataattaaatctgaggttccagtatccagagaaggtttattgattgattaattattgacagtgagactagggtagaggttataaacataaggctttggaatagaccagattgggtacaaatttcaaactttttacatactaactttgtgacctaatctaggttacctcatttctctgggcctcaatttccttgtttgtaaaatggaaataatagccacttcacaggattattgcaaggacaaaatagaatatctgcaaattacttagtgcaggatctgacactaatgggtcattaataggggctattattattaattattaagaccaagaattctgtagttttccttcattagctggaaagtaaaattcattggaatttagaacatattttctctcacgtgtttaagatttcattttgaaagtaagcttgaagagtcccaaaaaggaaagcatgagaaaaggaatttccaaaaaggaaaatttccagaaaagaaaatttggcaaaagaaagcatgatgtctttatttgattaaaaacattgcttatttataaacttcaaaatttctaacattggactgatattttaaatattgtgaaaagatgtttaagaatctatcatttttctagcatgttttcactcattaaaaagtgaccacattttcctgataaatttcctatgaagctgagctaaaacaaaataatcaaatggaaaatttccttttttgcttttataatgcattagcacaagaataaaaatatcttattaacttgaataattattaaccctccagttattttgtctatagatgtcaaataaccggtaataatcaaacagcttatgctttaaaaaaattacaaaacatgtatattaatcaatgagtcacaaaatacacctgtttcctattgcaatagtagcccactcttgaaataacaccttcatttaggcatacacacaccacagtttcaaacttgttatcaacaatttatcctccatagttggtaatgtcttgatatggtcaaagtctatcttttgaaaattcaaatacaaaatggtttaaaatgtcttttcagcttttttttcttattaaagaaacaaaacattatattttcctcacttatctgaacaattaatattgcattactctagaataaacacttaattttaatacaaaacttgtactctgcttgataacaccaatttaaataatcttaagttttttctttcctactctataacttaccttagccactgttttgctcttagaaaaaaaattattcaaaagtattcataattctgtatcttataactatttccactagagtatactttaatagtaggatagcatgtgtccacaaatattttatttgaggcagcagtgaagaggttaatttacagctgcatttatgaacgagttttatttatatttgacgtgccgtacaatatttatgtttcaattcataaactatgttttcccaagtggcaagaagtgaaatgttaattacatactattctaaaatagactgaaagacaaaagtttttgtttaagtaaagtttgaaattaaaaaatagggcagtgagttaaaaatctgatttattctttggaactaccagatggaatagtaaaagaggattttgggaggagagagagaagagtagagaagagagacagagattgagatggattttgaaattggccaagcatcatatcaccgattttttacattctggcataatagtacttcgagggtctgaagaaccacaccggtccgttttcccttactttaaagatctaaatggtatttttttttaaagtcttcctgggtacaccaggaaatttatttaaaaccatgccattgggtacgaactaagagcattcttcaaacaaacatgaccttttctctgtttcttgtattgctcttctcaacccagccagaaatcccagacaagtttatttacacacacacccgcacacgcacgcacacacacaccccacacgcagagtggcggaaacgccctctttccaacccttccaaacaattatctccgagagcaaaagaaaataatcaacagccctgtgtgctgggctgagccggagagccgggcgcgaggagggagggcgatccgcaggcgagcagggaaaacgtggctcctctgccgaggagaggatttgtgaaaaggagcgctggcccgcgtgcgcctcttgttccccgtgtaatttgcagccaatcatcagtaggtgtccacgtccctgcgtcctcctcacctcggcgccaatcacccccacccccgcgcccccgcccccagcctccacacctcctccctcgcctttctctgtggctcccctcccccagcaaccgcacactcgcacacacacaaacagagagagaaggggggagggtgagagagaggggaagagagagagagagagagaggggagagagagaggagagactccccggctccctccctccctcgcacacagcgactggagacggacggagagcaacgcgctgggagaggagagaccaccgacaacagacccgcgctctcacacatacactcacactcgactctttcctctccccccacctcctcctccttccacccccaccactaacaccatctcctcctccttctctctgcaacaagaaaaaaaagccatttacaggtattttttttgatccgcatatttatttacccccccccccccaacagtttgtttacaagtattaaagttgtaattgggagctgccaagacacatctggatttgtgtttctttgtgttagggggtgatgtgcaactaattaaaggcagactggcagcgtctgcaaattctaaggctccccaaataaaaagagactggtaagtgattgttctttctctttctctggcttttttttctcttaaatgtttgctgtccgttgggattgtgaaagtagattattaatgctggactccagcaagaaaaagcgtcgctgtattaatttattaattagtctgcacccgcccctcctcctgaatgttaaatatgacctttgatctctatgtctctggtagaccagacatacagtattaggcatgtaaagtcacattgtttaaaggcaaaacaggatcatgaagtatggatctctaatttagctttggcatagaactatagttatttgtgtgtgttttattttgtttttaaataaaatccaaacaatagctgtggcttagatacctttttcatgctccagagatgcattgattaaacaataatgacctggatactgggcataatcattttctacagtttctggtggtattaaaccttgaggtaggaagagggatggtgatggcaatcagaaaagcaaggaaagcttgtgtttggaaacaccactctaagactctaaaaaagggacgttaaattatttatttatttggaacaaggtcaaaagactaaaaggttgaaaattttccctccactcaatgtg

SEQ ID NO: 176 - DNA, 6000 bp, Homo sapiens
actcggctgtttccatttcacttgtcaatatgaatacactcctccaacaccctctgcctttgctttactgatgagtaaagaagggctgaaaagaaaaggaactgtgggttgccttatcttttcctttccttctgtgtcatcatgttgaatgcgagtggttgttgaacgcagggaagtaatgtgagtaagaaatgatatgatagggaccccgacctttcgtgtttctcagaacactactgtcttctttctgcatgaagcaaattcgggttcaaatggaaagcagggcctctcggctgtcagcaccccacttactcagtcgcagacataacacattcaccctagacttgattcgagtccactcaactcccacccaccatgagtccaccagaattgtgtgctcacgagcacagtgagcactttacgggagagagatggcgtattaaacgggcctctttggctcacagcatgccccgttttcccaacgggcttcacttacaaagcacaagttcaaagagaaaattactatattaagaatttcaaagggccaggcacggtggctcactcctgtaatcccagcactttgggaggccgaggcgggcagatcacctgaggttgggggtttgaaaccaggctcaccgacatggagaaaccccgtctctactaaaaatacaaaaattagcccggtgtggtggcgggcacctgtaatcctagctactcgggaggctgagggaggagaatcgcttgaacccaggaggcggagcttgcagtgagccgagatcacggccactgcactccagcctgggtgacagagcgagactctgtctcaaaaaaaaaaaaaaaaaaagaatttcaagatggcggttggagagcattaaaccaagtgggaggccgggcatggtggtgcgttcccatggtcccagccactcaggaggcagaggcaagaggagcacttgagtccaggagttggaatccagcctgggcaacatagcgagacccccatctctaaaaacagccacaacaaaaatcaagcagacggtccttctgacaactggtgacctgcgcaggttgcatgcccatgaagccagctctgaatggggataataaaatcctcctccagggttactgtgagggttaaatgggagtaacttgtgaaacaagcttagcatatggtgaatgttcaagtcagtggctctaatcacagatatttccctacacagcttagaggcccctcccctggggaggcctgaaggaaatcagggtgctggggcatgaccctgactaccgctccatggtcctttcagccatggctctcccttttaatctcttctccataccagcttctatgggggacttttctagcaggcaaacctggccccatctctccattgcttaaaacccttcagtacaaaacccaggacataacatagacaatcgaggttctcagtgtcctagccctgtctctctaatctgccctcctggtccttgcactcctgctccttacgatccagccacactaagggatcaaatcactatccctgacatatggctgagatttctcaccttcaactcaggctgttgttttctgcgggcagcaccctcttctccatgtgtctgaatatttccagaaaagctgggtgtggtggcttacacctgtaatcccagcactttgggaggctgaggcagctggatgagtagagaaggactgaaaataaaaggaactgtgggttgccttatcttcaccatgcctggccaacacggtgaaaccccatctgtactaaaaatacaaaaattagtgagaccagcctggccaacatggtgaaaccccgtctctactaaaaatacaaaaattagctgggcatggtggcaggtgcctgtaatcccaactacttgggaggctgaggcaggagaatcacttgaaccccgaaggcagaggttgcagtgaaccaagattgtgccactgcactccagcctgggcgacagagcaagactcagtctcaaaaaaaaataaaaaataaaaataataaataaataaataataattccagggaagacctctgtttcctcatgcccacccgggccccctcaggtgaggcgggtagatatacttctgctagataggtggtatgttctgccaccttctgtctggtggaggaggtggcaaaagccgtgtctaggtgccaggcatggagttcttggttcctggcagctgggaggtggagaatgtggacctgccctttggacagcctgcctgtgaccatgtcgccctggccaccagctgtgtgtctgtccaggtacaaaaagagagcatggcggggagggacgtgagcccggggcaggcagctggagtgtgaaatgactgcatgtgattctgtgggagctgggggggcacccagaagttgtgacaggggcagccgagcaggcgggcatgctgacaggtgtgtgagcctgccaggtgagggccccggttgctggcaactgtttgtcctgccatggcggtttgaaggtagggtggggtgggctggagaaatggaacataggcctggctgccagagcaaacagtcaggccttctggccctaccttctagcaaataccaactcacagctgagggtgcggtggagcgggagaggctggggttaaggtccctagggccagcagagaagaagtcagacctcaagatgtgtgtgtagggtggagcaggggtttcccagcggcttgaacgcctagggctcccgatctctgggaaatagggctctagcggggagctgtgaggctctgtccccagtcaagtcctggctaacatttttcctggcaacttagggatacagttgggattttgtggactatagcagtgggggagaaaggaatagggtggaaatatctggggatatcagacttgagatataaaatgtcaggctgagcgggatgcagtggcttatacctgtaatcccaacattttgggaggccgaagtgggtcgatcgcttgagtccaggagtttcagaccagcctgagcaacattgggaaaccctgtctctacaaaaaaaaaaaaaaaaaaaaaaaaaaaaaaaaaaaaaaaaaaacctgggcgtggtggctcacgcctataatcccagctacttgggaggctgaggtgggaggatcgcctgagcccgggaggcagaggttgcagtgagccgcgatcatgccactgcactccagcctagatgacagagccagatcctgtctcaaaaaaataataatggggctgggcacggtggctcatgcctgtaataccagcactttgggaggctgaggtgggtggatcacctgaggtcaggagttcaagaccagcctggccaacatggcgaaaccctgtctctacaaaaaaaaaaaaaaaatacaaaaaatagctggatgtggtggcgggcgcctgtaatcccagctactcgggatgctaaggcaggagaatctcttggacctgagaggtggaggttgcagtgagttgagatgtcgcctcgccactgcactccgcctgggcgacagagtgacactacgactcaaagaaattaaaaaaaaaaaaaaggaaaataataataataataataataataataaaatcaataaataaaataccaggccggaggagccacaaccagaaaaccagcattcctctagctccacagcaccaggctgagacgcagctgatatcagggaatccatctggatcacccatcaaaagccccaaagcacctttcggtccagccagtcctcagggagtgtctttgctcagggaggcaccgagaggcggagaggaggaggggcccagtcctgtcccaggaggaagagcacagaatctgggggtgtgcatgatctggataggggtcagcagctccagaccaggctggaagttgaggctctcaggagcgggtgaggggctgtgttgttggggcagggcgcagctgcagctatctgggaaagcttcctggctgcagaggcacagaaggggtttggggtttgaacagccagctgtgcgggctcaatcctggcatctctgaccctgtgcagccttggtggatggcagagactgaggctctagaaggcagagcccagctcgtggtgggaggcagataagggctggggtgaggctgtctgggtctctcaagctggagggagcggcaatcaggctgttctcttagctcctccttttggcggggcgagtggtttctgccttcctgcgacttcctcctctgacccgctgccacttctcctggccctcctggggcgggtggagctcgggagcgctgaggcggaggctcatccatctctcccctccctgggccagggtcagtcccctgggagccctgggcagagacccccccaccccaccctctcgggcccctctggggagccccacctttgctccctggttacatttcctgctggggtgacggtgtgagtctagggtaacgagcctggttttctgaactttcttatgcaccggctctttgttaaaggttctggttatgtgaggaataacccctcgccggtgggcattggaaaagaataaagaaagcagaaacaccaaataaggagaacatccagcactttcctctagagaagacccgcttattcagaggctttcgggttccctctggagtcacttcgcagaattcgagctgggaagcaggacgccccgggcccaggagagcccagaggaggcgacgcgcagcccagagccgggtgctccgcagaccgccccagctctcggccagatcccacccctagcagctccgcggaccgggaccgaggacccccgggccacgcgcccccggctcccgacaggcccagcacgcgccccgcgggcggtctcagtttcccctctgcagaatgggcgggggacccaggcggtgcgccccggggcgcggagggcggccggaaggggtgtgatggggggcgggccccgcgccgccccgccccggggagggagtcccgggcgcagcatcctggcgcgggccggggccgccgccgccactgccgtcgggtaaggtcccagcacggacatggcctcgcgcggcgcccgcccgggcccgagtcccccgcgccccgctttgtagccccccggcggagaggcggcctcgacggtgcggacggcgcagacggccgggcgggcggcatggaggcggcgcatctgctcccggccgccgacgtgctgcgccacttctcggtgacagccgagggcggcctgagcccggcgcaggtgaccggcgcgcgggagcgctacggccccaacggtgagcgcgcgggccgggccgggccggggagcgggggccgcgcgcgccgcagtctcagtttcccctcctgcctccccacccggctctgggcgggcaggaagcgagggctccggaaacctcttcggatgctcctggggcacccggcggggctgcgcggccaccttcgccggcgccggggctgggggctgggggctgggagcgggttccagctggggagaccggacgcctggcaccctctgcgcggtcctcccggacttcccacctccactccggccccgtccaccctggaagcgttattccaccccatcctggaccgtattccaccccaacgccgcgccgctcccgctggcatcctgcaggtgcagcgcagacaccggcgggcgagggacggccggagactcaggctcggcctcccagctggccccagggtctcccctgagggctccagaaaacgcccaggaaggtgccgcttatcagctagcagccttggggcccccacccccaccccaggtcttcctctttctgcaacccgaagcggatgtggctggcggagtcggtgggggctttgaactgctgaggcgggagacccaccttcctggggtggcggagtcaaggcctcagggaactgccagggaggcctttcccatctctggggagggagggaggcttcactatcatttcatcctcacctccttcaaaggagtgtgggattcttgctcttgccaaaaggc

SEQ ID NO: 177 - DNA, 6000 bp, Homo sapiens; identical to SEQ ID NO: 26

SEQ ID NO: 178 - DNA, 6000 bp, Homo sapiens
aagcaacaaacaagccaaatgctgagattttatgttcttacaaatcacataattgcaaaaccccacctaacaataatacaagggtgtgaaaaacctggtaacatgaagtaaacatatactttgtttagttagtgatggctttcttacctatttcatccacgacttgaatcatcttttctagttcttctggacagacatcagggcaatgagtgaagccaaaataaatcaataaccactgacccaagtagtccttgtcagttttacgctccccagtatgagttgtgagggaaaacggtcccccaagtaaaggcttgccgatgtgtcgctgccgttccttctctaactcttaaggagacaaaaacatatcgacaccaaaaaaaaagtcaatttaaccagaggtactcaaatacctgacatatggcccgtactatgctactcatggtgggggcacaaaatgtggaaaaaacagtttcagttttcaagaagctaaaaaaatcttttcagaaaaataagcacaaaacattaaaacaaaatcaaatgaaatgctatggtatgttgtaaaaaaggaaaaaatatttcttctttttcaggaacaattcagtcctaagccattagctgtgtccatgctgggggcagggaggggctgcagtggcctagagctgaatgtctaaacaagtggggtgcggtgggtggcctggcatagggagtctgatcctgagggtgctaaggagggcagctgggtggggaggtgatagtggtgacgggaccttagttacacacaggaaattgatgaaataaatgagtatattaaagagaagagagttacaataggaaacaagagtcaactatggagagaaagagagctaggctgaaccctgcagtactgcaaatacactgcaggtactagtgtgaacttctatctatatagatataaataaatatagatgtacataaatatatctattttctcaccatgtccactgagaggaccagggagcagacacactccaagaaccatgagcccagaacctgacttctaaatatcattcttcactaaaaggaaacagctttttggagaaatggctgataccagggttgcggcaaagaaagtgtaaaatgaggctggaacctcttgttgtggcagaaggaaagcagaacttagagaatattggagacgtgtcaaagacacagaagcctgctccaagggggctcccgctgatcaatctgggacaacttgggcatcaaaataaagagaatatggatttaaactgaatgaatatataggaaacaagtccacagatataaataaatgaatacattgatagtgggatggggaacagaatatgtaagtatacgtatgtcaatacaaatcatgaaacaccattaattacatgagtaacttttcagtagaaaacctgttagacacacattaatcaagtgatcaaactggacattatcagtaatgggacaactggtactatgtggtatctgaccagatgcacggagaatacagcatcacttttgtgatattcctgccaaaggtacacaacccgaatgacctgaatgaggaaacatcagacaaatccaagctaaggggcattctacaaaataactctcctgtaactgtcaaagctgtcaaggttgtgggagtcagttaaagcctgggaaactgttacagatgaaggaggctaaggtaaacaactagatacaaggtggtatggttctgaaacagatccttttgctctgaaagacatcaagtggcaaaacttggaagactgaactgtaatccagcctgggcaacaggagtgaaactctgtctcaaaaaacaaacaaataaacaataccctgaagattatctgaacactgaacagcagcaaaattatcagcgtcaattttctaattttgatggttgtattgtggttatgctagaaaaggtccttgtttgtaggaaatacaccaaaaagtgtttggagctaatgacgcaacatgtcagcaaataaatactctcaaattatttaggaagacttttcagattatttaataatacattttttaaataaaacaaacgttagaattgcacttgaaattccaaactaaagtcaaaaaaagcttccatattctagaattttcccgccacaactttcctagcttttgtttctttgtgaaactaaagaaacttactgcttattagactatgaaaatcttacccaatactacttattatgccaaagagtctcatatatatgtatgtcagtacaaaacttaacactgctaagttcctaaagcctatgaattcccagatttaatcattaacctttgtatataatgttatcaaaagagactccaaagaatggaaagatttaagcaatactttaaagatttacctaaaacctctaaaccaaatcttaaaagtcctaggatattcactaaaatgcaaagttcttataaataatttctaaatatttcaagatgctaatccagagcagttcctggcatttcctgaccaggctcttttcacctccccctcatccacagagggcatgcagtatctactcgcactatgctccttgcctgatctctaggaagccttctcaaatctcaaggctgggacttgcttttgctctcacaacatggtaagcttccttctggcctggcagaatcgcatctagtaaaatactttacttctgtgtctgtttcccttccgtgtgcacctcaaaggctcgactacatcttactcatcttcgtaccctccagatttcatcttgcccagtcaaatctatccacagtatatcttttaacattgttatgcagtggtatcctagcttggatcctggaacaaataaaagacattgatagaaaaacaagtgaaatccaaatacaatctgtaatttaatagttgtgtgccatttaaaatttcttagtcatgaaaaatgtgtcatggttatacaagatgttaatattaggggaagctgggtgaaaggtatgtagaacctatgctatctttgcaattttttggtaaatctaaagttgtttcaaaacaaaaagctaaaaaacaacaaaaaaggtgctagtccatagccaggaagacctttatacagggctgagcagatgataatctacttactctctgccttttctttcttgacgtgcttcattccagccagtaaagctcctccaatagcaaatgtgattgctaaagacttccaggaaacaggctactggggcagggatttcaaacataaaaattctagtaagatgcaaacatttaaccatacaaacttattaaagtagtttttaatatacatacacacaggccatgatgttaaatgtgcaaaatgtttcagggatgagaaaatgctcaaagtttctgtggatgcagttaggtctgggatctgaactacaaaggcattcatctccaggggaaagttccctaagtcagttctcttcatgtaaataaaaaaaaaaaaaaaaaaaaaaaaaagctcaagtaccacgattgttactatgtgtgaccctagctccagtaatgactttaaaaccaattatggccgggcgcggtgggtcacgcctgtaatcccagcactttgggaggcggaggcgggtggatcacctgaggtcgggagtttgagaccagcatggccaacatggtgaaaccccatctccactgaaaatacaaaaattagccgggcgtggtagcggacccctctaaacccagctacacgggaggctgaggcaggagaatcgcttgaacccgggaggcggacgttgcagtgggccgagatagggccactgcactccagcctgggcaaaagagcaaaactccgtctcaaaacaaaaaccaaaatccaaaaacacacacacaaaaaacaattatctgcttatgctgatactgagataaatagaccaaacgaaatttgggaggttaacttaactctggcttccagaagtaacaatgccaaagtagaagaggaatctaaaagtggagcttcttgcaaattacacccattatttctttgtacccttattcaactccccaaatgaagatgatgttggccaactagactaggcctaactcattaaccttcccgtagctccaaaaacccacttctcttaccacagggtagtggctctcaagttatttctgggtcagaattagaactcgagagaaccccaagaaaaaggcagatccacacataactaagttccactttttgtttcaatttcaacgtatacatggaactctggatggggctcaagtgacaaattataaaagtcctctgacttctcaatcacggtaaactttaggttcatacccttaagaaaacctgaaacttaattttttttttttttttgatggaaacgctaacataaaatccaagtcggggcatccagccacgtggagagggtgtaaagtctcaagttctctgtggagaactgggactacccgcaaggcacgggaaatgtaggatgaaattccatgacccaggtaaggcgcgcaagctaaggacaactttaggggaggcggagtagtgtctgaggttacgaccaagtgggatgtggccgctgggctggccgacagccgcgacgagcaccagaagggttccaggtgtgcactcaccccgggcttcgaggggcgcgtggagtctccggggcccttctgcgaccacgggggtggcggcctcgcagtgctgaggggccgggttcccaggcaatagccagggcgccccgaggcacgccacgcctccgcttgccgcgcgcagaactgcctcagcaagactctcgcagtcccctcggctgggccccaaaactcgagtccgcgaggcaagaagcgccaaagttggccacccagaggccgcataactcgtccgggtactaggaccagcatcgccatgagcctcggagaccgggtctcctttgaccctccccgcgatttccggtagcgttccgcttcctccggaagtcggaaggagtcgctctgtccgtcccgctcgttggtggcgctgttacatagcccgtagtcagaggcctttcagcccaggggccggcgcacggtaggtagttccctgcggctggaggcgggtctggcgcgggctgggcggtgctgcggggccgcgggacagcggagcgccgggaagggggctgccttaggggtccaggtgcgcggctgggccgaggcaaggcggccccaagcgctgggggcccccgctttggtcgtgggcttcggtgaccacagctagctcctcgcgccggggacacccccacctcggaagagagaacacactgcctagagacccacgggactgggcagcccccataaccctaccttgtctggccgactttgtcaacctcgtcctgccggccaagaggaagtgccagaatgttgactcctttacatctttgaaatagaaaccgacccattgcgattgaaatagtctttaacttaaaaaaaattgctaattaggataatttgagtggttagggcggtctggaagaactttaaatgcccagcgcttctagttatttaacattataatgtaacctaattaataaagcatagcagtgtgtaaagaaatatagacagcatgatatcccatccgttaacttagtcttcctgggtcccagtttcttaaaatactctcacggactcccttgctccctacagtttcgttatttgaagtttgttatgggttcctcatctggaactgcttatgttccttgttaatgaggccaagagcattcgtaggtttttcgttctttgtgaaagtctaacttcatttcatctgcctttatttatatcttaatatccgcaatattaaccactccctccccgcccctacctcggtggttgctttacaaaatacagagaaataaaaaaaggaaaatcgtcctctaattatcttccttaactacagatcccgctcctgtgtggcttttttttcccccatgggaccgactctgagtaggagaaactcgtgctctgatgattgttggaccagagca

SEQ ID NO: 179 - DNA, 6000 bp, Homo sapiens
gggttaaataagaattttgtgggacatagtaatcactcagtaaatgttctggtctgagagtgaccaaaaggatggaactagagatatttgggcaagatatttgctatggcctgaacgtctgtgttcccctaaaattcatatgtggaaatcctaacacccaaggcaatcgtggggcctttgggaggtgattaggccatgagggtggggggcccccattaatgggattagtgcctcataaaagagatcccagagtcacccctaggcccttcctctcactgtgaggttacagtgagaagatgaccttgtatgaaccaggaagcaggctgctggcatcttcatcttagactttctagcctacagaactgtgagagatttctgtagtttataagccatccagtctacattttgtataacagaccaaacaaatattaaaaataacttcgtgattagaagtgctacaaaatgctagactacgcatggaaccaagagtttctatttatttactttttgagacagtctcactctgttgccaggctggagtgcagtggctcaatctcggctcactgcaacctccgcctcccgggttcaagtgattctcctgcctcagcctcctgagtagctgggattacaggcacccactaccacgcccagttaatttttgtgtttttagtagagatggggtttcaccatgttggccaggctggtctcgaaattccgacttctggtgatccacccacctcggcctcccaaagtgctgagattacgggcatgagccaacactcctggccaaccaagaggtttcaaggaaaaaagccgtaaacttttggtggttaactgactgtggtcctaaacagaggcaggggctgtgtgcaatgacttctcaggatctctttcagcctacaggttcctggaatgcatttcagctaacactacaagagtgatgtcccttgctactgagaaccctgggaacagctcagctccatggtccagccatataaatctgataaaaataggagctgaaataccatcctggagttgctatttttaaaatcatctgagatgctggatggggtatatttcttcctcaaacacatcttgctgtttcctcctcttggtgggcaggatgctaacgtggcacatgatacaggagctgttccacgctgctgctcacacccactcctgccagagaggggccgcagggccagggcttcccagatctagatgcacctgctcctccctctgctcctgaggcccctctggttgccccagcacagaggtgtcctgccacttccaccaagcagaaacacaggagagtttgggaggcaaaggaaatgggaatggaggcagcactgatggcttggaaggggactaagacctgttgttcctctggttgccttggtcccactttggcacagttaacatccaaaagaaacagtccccatgggccaaagccctgcttatcccatcctactgcctcttgctgagccgctcatcatgtgttgtagttgcaccaaaggggggcctggggccaaaaaagcacatggagaggagagaggagagaagaggagaaggaaagatggaaagacaagaaaagagagagagagaggaaggaaggaaagaaggaaggaagaaaaaaaaagaaagaaaaagaaagaagaggagaaggaaagatggaaagacaagaaaagagagagaaaggaaggaaggaaagaaggaagaaaggaaagaaaagagaagaggagaaggaaagatggaaagacaagaaaagagagagagaaaggaacgaaggaaagaaggaaggaagaaaggaaagaaagaaaaagagaagagaaggaaagatggaaagacaagaagagagagagagaaagcaaggaaggaaagaaggaagaaaaagaaagaaaaagagaagaggagaaggaaagatggaaagacaagaaaagagagagaaaggaaggaaggaaagaaggaaggaagaaaggaaagaaaaagaaagaagaggagaaagaaagatggaaagacaagaaaaagagagagaaaggaaggaaggaaagaaggaaggaagaaaggaaagaaagaaaaagaaagaagaggagaaggaaagatggaaagacaagaagagagagaaaggaaggaaggaaagaaggaaggaagaaaagaaagaaagaaaaagagagaagagaagaggagaaaggcaccagaattgcttccctcctgccccaaagatgacatggcttctaggcagtgagctaagcttgtggccatgctgttaagaaactggagggaaaagatcatcatgagtaagcacattgtggcctaacctgaggggagcagaattacggttagcttctgggcacctagtaaccaggcttgggataagctgggggagaggcctgaatacagcttataggttagaaaaggcacgccacctgcatagtaacagcacacacttatatatagcaggttatgctttcagaccaaattcgcatccattgcctgatttaatgccaacaatagccctttgaataagcagttatttcctttcccctccccccaccccagtaagaaaactaaagctatttagtggcagagacaagagttggaactcaggtctccaggaacaaatgctggttcttaagttccattttctggtagagtgacatttacgtgattcacggcaagaactgcaaactgtgcttagatctagttcatcaaatggccaagtttagaggctgggctgacgcttggatcagttctgtcagattcacttagttatgaagggcagctgcttactccctttgggccagtcttcccatctgtagaacaaggaggctcttccctcttcctcgacttgcccgaggcagggacttagtcattgtgttctttatacccagcttaattccaggcctggagatggcatgcaataaatagttgttgaatggctcacgcctgtaatcccaacactttgggaggccgaggcgggcggatcataaggtcaagagatcgagaccatcctggccagcatggtgaaacctcgtctctactaaaaatacaaaaattagctgggcatggtggcacgcgcctgtagtcccagctactcgggaggctgaggcaggagaatcacttgaacccgggaggcagaggttgcagtgagccaagatcacgccagtgcactccagcctggcgacagagcgagactctgtctcaaaataataaataaataaataaataaataaataaataaatagttgttgaatgcatgtctgactgattaagccaaaggcaccatattcaaacaaaatcagacactggtgcaatgccaaacagcttctgcccgtgcaaggaatgatttagcatggagcacagtcacctgcagaggaacaacttggaggcagactctccttactcagctcacttggagcagagcttcctgagttgggggttcttgacagataagccctccagcttcagcagaagcaggcttggagctgccacttctctgaacccccttgcacttactgtcagtcactcacaccttgcacttattcacatcctatcctgcctcgttcttgaatggagtccatggtgagccttctctgtgccgctggatggtaagcttcctggggacagggaatgggtctgatagtttccttggagcccctggcgctcccggcactgggctgttgatacgtggggctccggaaacactgtgctgacctgtgaaagggactggcctaaggggctgtggattgtcctgtagggtgacttctgaactgttcttcagcctgggcagttcccaggtttatttggggggatgcctgggtccaaagaaccagggtcaggggcccaggggtttcttcctggagacaggatgcctggcgccttcaataacggaaaggaaactgagaaactttctgaggccaagataaagagtatgcaagtgaggggtgcagagagagcagtttaggggcagcaggccccaaccgaagcagaggaagggcccacgtctgggcccaggggactgactggctgccttgcgtgcatggggcacgggaagcataggctcccggaacaggaccctgccccagtttccccagtgagggaaggacaccgttccccgtgggatagagcactgcaccctttcttgattctcattgttcccgggagcgagcgccttggctgcgctgggcatacccaccctggcgccattcacaggcagtgcctgccctggccctgtgctcaccccatcaggcctcctcttccgcctctctggcacccacggcgcccctgcttgcctctgtccgggtctcggaggcgcgaacaccatcccaagcctgcgaccgcgcggcatcacccccgcccttccccctcctccaccccgccctttctacccctcccgggagctcctgggagtcgggccgccgtgtgcgcaagcgtgtccagccccttccccgcccccaacccgggcccgggtccccgcctcccctgcaggcggactcgcccgctcccaggccggacccgcgcccgggacagggacccggccgagtcgagccgtcgcgccagcgctgcgccgccggtcggtgcgcctagcggatcggagctgcgcgcggaaccgtgctgccccgccccgctccacccgtgagggtgagtacgcggcggcggtgcgcgggggcccgcggggcggggcggggcggggagccgcggggtcctcggccgcctgaccccagccggcgccgcgcctcccggagggggtcgggccctgcacgtgggcgcagcgcgggtcggggtggggctgccacagccctgcggagctgctttccggggtccctttccctggaccagattttcgcgggaagccggatcctctccgttcccttggagtgagcaagcgggacagttctgcggaaagtttccgcccccaatcccccagccctgcgcccggactgaagcggcggcccccacctccagcatcctcgagcgatggtttctcccacaactaccccggtcaggtccagcacttgggagctgactgtgctggaggtgacaggctttgcggggtccgcctgtgtgcaggagtcgcaaggtcgctgagcaggacccaaaggtggagttgtcagtgggaggccggctgtgcccagggtcctagggccacgttatgggggtcgtcaggcctaggccactgtgcctcagggctgcatgggtggtgagcagtgggagggatgcgatggggggagtgggctcagctgtctgctgtgggtgtttcctcggggacctggctggcagggacctcccggccagcccagaactgccaacatgtctgccagcactgcccctccattcccagtcctggggggaggctctgtctgggcagcttgaggcctgacctactgtggctgcttcctctgctccccagcctgggtcctgagggcctggcttaagggaactgctgccagaaggctgggagtgtaggcagtgttcgggtgcccagctgtgccctgtctgacctcatggccacccacaagctggcaccccccacaggcctcttggggaagcctgtactttccaccgccggaggcgggtaccgcgtggaagccaggctcaggcggactcattctttttgaactttgggaacaggcctggtacaggctgagttctcacaagagacacacacccgtgtcactgtctcctgagctgtgccggacccgtcctacagactccacctcctctaggtcctggccctggcatctgccagggggattttaaatgagttgatatatgctaagtgctttgaaaggcgcctgcacggagggagagctgtataaatattcactattggtaatatttctcccatgctgttactctccaaagctgcccgataattctagagtgggttccggggacgtgcccgctgtttggggcctagaaatgaactcgggaggttgttttgcttgctgagagctggtctgggaatgccccttgaccgttccctgccctgctcctggc

SEQ ID NO: 180 - DNA, 6000 bp, Homo sapiens
aagaagagggttgaattttaaaactgcaacccatgaagctagaacacaataagctaaccaaacttttaagagtgggtagatgccgggcgcggtggctcatgcctacaatcctagcactttgggaggccaaggcaggtggattgcctgagctcaggagttttgacaccagcccgggcaacacggtgaaaccctgtctctactaaaatactacaaaattcgctgggcgtggcgttgtgcacctgtagtcccagctactcaggaggctgaggcaggagaattgctagaaccagggaggtggaggttccagtgagctgagcttgtgccactgcactccagcctgggaaacagagtgagactctgtctctaaaaaaaaaaaaaaaaaaaagtgggtagaaaaactttttggatgtgacaggacttatcaggcatcctttctcaggaatttctggaaagacacacccccgtgaagtaaatgaggaaatttctttttttacatggggaaattccccacatagtaagtctacaaaaggcctggagaatgaatccagactggataggaatgtagaggatccaatgggaaaaacaaaaatgcaggataggtatatggcagatatgatggaatatctgcaaagaaattaagggtatgtacatagaaaactatgcaatctattttttaaaaagcaatcatttattccagtagggcaagctgcacaaaaaatgaaatactgtcccagcactttgggaggccgaggcaggtggatcacctgaggtcgggagctcgagaccagcctggccaacatggtgaaatcccatctctactaaaaatacaaaaaattagctaggcatggtggcaggcacctgtaatcccagctacttgggagactgaggtgggagaatagcttgaacccgggaggcaaaggttgcagtgagctgagatgatgccaaggcactccagcctgggcaacagagtgagactctgtctcaagaaaaaaaaaaaaagaaaaagaaaagaaatactgtacattacttggttctgaagtacatagacaccacatggttaaaaggtaaacaatgattactaatttaacaaaaaattatgatttaattacactgggacaatgtagataaattatgttagttaaaaaacaagaattgaatatttaaaaatgataattcaagaaaattagtgtaaaattttattttaaaatatggtaataaacactagaagaatcagctacaggttttaaaagtggttgcatctgagagagaaacaggggtgtgggggagaataagggtgaagaatagttatttttactttgaaaaatattttaaattataacacaaacaagagtttctaaattttgaaagtgcattgcattaataaaaaaattaattgggatatttgttttaacttatcagaacacatgccatttacatcttttaaatttccttaatttctaataaaaaaaaaatcacctctatgcagttagttcacttctcatatacactcaacttcagtttcttccccactccaagcatgctgacattcactacccaaaaacacttctcaagggaaataagttcctgtttatccatttataactttcccctcaaagttctagttcaaggccatttttctttttaacatgagtttgagtttactcaaaatactgtagagtctgagaactaatcagcccacacagggactttttaaatacagcttcctaagtagtctttaatcttctacaaaccaattcattctgcatatagtttacaagtaaatcaatttaaaatactgttttcatcatctctcctttgcacaaggacctgatgattcccctcttctaatgggacagcattcaaactcttttttgtatctgaaggctcccagtctgcccttcttatctcatgttcttagtccttaactccccgaagtgtaccttccacttttgtcaggcagatctttctacctcctcttcataacatgctgttcttacttttatctcttataaatgctctgtccccaaaattgaacttccaagttgaacgtcttcacctaactttttatttatactaaggtcaagctcaagttccatgactctggaagctgcccctttggcctgcactgacccatctcttcttgcttgaattcagacagccacgaatgcttgcttcaaatgaatgtagtttcaaaactgtgttgggtcactatcatggaggtagaggtgtgggagtggtcattgtttcatgcaatgccaaccacagaaaagaaaaataactattacttgaacattttaaaaattcagataattaaacttgaattccttccaagtcaaccttaaaaactcaccatcagtcaattaaacaaaaaaattagaacactgactttttccccactgcaaaataggcccctcttccacaaaacacaacacatggctaatacaatgagactactgtgagtgactgctgcctcaagatgaggcacagaacgagacacattcaagaagggatacgagggatacgagattgcaaggaaataaagggtgtttatatagaaacaaacctggatccactcaaatttatttctttaaagtcatttttaaactttggtattttcactatttttccaaaaaatcacttgctactcatacctcacaaacagtggttttgcatcccaacactaaggctgactttaaagacaaccaatcagctactgcatatccattattatattaatgactaaagttttatcaaaataatcatatttgtacttacttgaaagatacctttactttgggtttaaaatagggtgcattctggtctgccaaaaagacgattaagtcatttcctaaagaaaacaaatatatgatattagaaaaatgtttgttgataagatatctaatcagtggttacaagaaggtttctgggcactgttctcaacaagaaaacttttattctactccagttcatctgccctctcaagcatagtcccactagtccaatggagatgcctaacattatatcacaagttcaatgttcaaagtagcagagaaatagaaaggatgaacatgggaaaaagcagctgatcaagagaaactgaagccagtggattctgcgaggagtcagattggttgacttaaaagaaccatataaagatgccttataactatactacatgtcaagacttgtcttccccgaatctagcaatgctgtcccttgtaaggctgtttggttcattacacagatgcatcacaccaaggatgcagggactcccattgtagatatctgacaaagacataattaagcatgtgagcacaaaatgctgaatcctccaagaccctcctcctatggggccatcctccagagggtgacacattcttggagctcaattagcactcattgagacagacttttggaattgtttaatcaaacacaggccatctttaaagtcaaggctactctctgtatccagtttggacacagcagcaacaggtttggcagtacactgcaaaatgaggagtcaaaaagattgggaaaatattcagggtttgtaagaggttcctgcatccccgcaagggctccaagaagtctggttcaggatcctgtcaggcaagctctgagtagctcttccttccttccttcacagcattgatctttaagcagcacctgcttctgtaggtactcaagaaccctaagaccccctaatgcccactgtcagcatcaagatttacaaaaaagttagtttaacgattgtcaaagcaaagaatttccaagaacaagttagcaaagaaagtagacatttggaacactaaggtgatgaccaagatgaggaaggagtacacgaaagaacaggcagctcaagagagaaatttctgtagtttgagactgctttcccaaggaggcattgggtttatcagtggtccctgcaaaatgcttgtgtgagctgtttagtgtttaggcccttggaagggtacattcgcttcatagaaagttgtggccttgacaaagaaaggggtgggcgaattaggtaggtggggaggcaagaagaagccccctatgagaagagattgtcaggttgcaccttttcatgttcatcaacggggaaggaagactgaagcaaaatagaaaggaatgagtgggccttgggagcgaacgttgaggcaagctacaaagattcctaggaatcaggaagcactttggaaaacaggtgattccatggggaggagggggtaaggtgactgggtgagggccgcagacttcttaggaacaaaactgaggtgctgtcagggcttttgagggtaggtcaaactgtagggtagctgggtcagaacctggggttggaaagggtggtgcaaaaggacaagctgttaagaatgctaaagggaaggccacagggctgggagagaaggaccaggaaatgcagaaggaccggccattgggcaatgggtttggggaacaccgggagaggcacacggacagcgaacagagggagggcccggcaagcactgactttcccgcagcacgaagagatccgtctgcttgtcggagttgaggtccccgaaagccgcaagggtgccccaggcctcggccccaaagagctcggccgtgacgttgtgcagcgcccgcgctgggaccggcccgactcccagtagtgcaagccctgcgaggagcggcgagaagagggcccaggagctcgggagccggcccgccgccgccatggcagcccctcagcccccgcccgccggcccaacgccgcgcttgacgacagccgcaaagcaccgcgttaccggccgagagagtggcgcgcagccccgggacgcgtaagagccgctgccggctcctttttctctctcccactagggctgcccttccgacgctaaaaaagcagtggagctagggtgaaagccgccctcacgctcacttccggcaggcgcgcctcccgacagtgtcgtgcggggggcgtggcccggcattgctgacaggcggccccgggggcggtggccaaggcggcgaccggagcgcgatggcgggggcggcgggactcacggcagaagtgagctggaaggtcttggagcgaagagctcggaccaagcgctcaggtttggctggctggggcgccgccccccacccgagtaccttgggtggtgcttcgcctcaagcgccttggcgggaggcaggtgggggccctgggaatgaacctgtgccccgagttcctccttagaaagcaggtggcggccctggccttgtttctaatatcttcctccacctctaaaaattaggtggcagagccagctccactctgcgtgtgcccccgactctattccgcttgtgagccccactcggaaagtaggcagcggtccggacttcccttagagtcttctaacttaaaaatcgggcggcggcacattcctgggaaagggaatgtgtcttccctgtgaatgtgtctttcctgtgaatgttctctgcaaaagtcagatagcttaatcagaccaagtcagatgtaactacgatctggctgcagaaagccggcgtctgggctccttgctttatgtcttatatcccttttacattccccacaggttctaagcagtagacctgtcatctatctagcagaaactgaaggagactgggcctcagatattgaagagtatagttagggcccagaaagaaaagggcttcttaagtggccccaggttgtgtggtttccaaacccgaaagcatagaggtcagaaggtgccttgcaggcagttttaacagttccaagtgtcccgaactgacttgttcaaattgcaacgtcatgacttgtggcgttattaaaacttcctgtattcctggttggctggatataatcttgaacaaaaggcatgcacttaaacaggaaaggtgaaaggcggaatgcaggttttcagctaaggagcttcccttttaaagaattgatgaagtgtcattattgggggtgggtgtgaaaggtgttagctaggaaaattaactttgcacttg

SEQ ID NO: 181 - DNA, 6000 bp, Homo sapiens
cgttacaaacgttaatattgtatgtcgacggcagtaattaggtattttcaaatctaataataaagaatcaaaactaggcagtaatgagagatgttctgataattagatctggggaaaacagagcaaagtaaaaagagccttgaaacattacttacgcatgtggatttgatagaattcgttgacataattatataatggctggttgattagattatatacatcaacttttaagtttttgagcaaaagagttatgggagaaaaatctccctccccaaactcccgaggatgcttggcaatcaatgtcaggagacatttttggtttttacaatggacaggggtttgctctaggtatacagtgggtagaggccagggatgttgcggaacctcccggaacgcacagaaccgccccacaacaagaatcacccagcccaaactgtcaatagtatcaaggttaagaaactctgggctagattaaaaggtagagaagttaaccgtgctacaatttaaccaaaaggtgtaagaactaggtcagaggcctccaattagtcctttgtttggcatgaccagtctcttcttccattaagttacccagaaagccaagttatatttttcaggaatattcaaaaattaattttacgttctgctcttaataaatttggggtttatacccattaaaatggatgagtcgcagaaacacaatgttgaatgaaaaaagcaagtaaagcaaaaatacattcagtatgatatcatttatataaagcttgaaaacaagcaaaataaaacatattatttagggatatccatagttacatgaataaaatgaaggaattcaataacattgaattccggatagtatttatgtctgcaaagaggaaagagtttgaagaaaatgtggcagggagcagtccttaaacatcttaagttcttttttttttttttgtttttttgacagagtcttgctctgtcaccaggctggagtgcagtggcacaatctcggttcactgcaacctctgcctcccgggctcaagtgatattgtcctgcctcaacctacctgggattacaggctcgcaccaccacgtctggctaatttttgtagttgtagtagcagcggggtttcgccacgttgccttgtctcaaactcctgacctcaaatgatccaactgcctcgggctcccaaagtgctgggattacaggcataagccactgtacccagacacgttttgattaaattctattttcaaagttaggttgtgggttcttgagtgtttcgctcgttattgtactttatgtatgcatgtatgtatgtatgtagaaacagtttccttaagttcctcaggctggtctggagctcctggcctcaagtgatcttccagcttcagcctcccaagtagctgagattacaggcatataatgcgcccagttgtcagtattgtactatagagtttacatgtatgttatatattcttttgggtgtatcaaaaaatcacataataaaaacaaataacatgcagttataaagtagtggatttgtccctgaagatttttcctttaagttctgtcaccatctgcaggttaaaactaggtattgcagaaaacttgtttttcaaagattaaaaagtacaaacggctggatttctgttacagacatgcttacaatccatctgtggataaggagcatacagaatacattaaagagataaacattatagcaccaagtgttttgttttttttttgagacagagtctcgctcaggctggaatgcaatggtgtgacctgggctcactgcaacctccacctcctaggttcaagcaattctcctgcctcagcctcctgagtagctgggattatagtcacatgccatcacacccggctaatttttgtatttttagtagagacggggtttcactatgttggtcaggctggtctcgaactcctgacatcatgatccacgcgcctcggcctcccaaagtgctgggattacaggcatgagccaccgtgcccggctgtgttatcttataagtaccacctggttagtgtcctaccaaatatcaagaaacagaaatagtattttcacatcataacaactgatttagtttatgtgaataaaaatttaaatcccttactttattcatcctgctactaccttaggccaagccttcattacttcatgacaggttggcacctgttctccttgtcttcttttcctagtctttacaaaacattgccactagattgaagtcttcaaataaccatttcattacagcattgacctcttccaaagtctcaaatggtttcacactaactgaagaacaaagtccacactctttagataagtagttgactttctatagtttggccccaacctggtaataaaccttgccttctcccacctccccatcacttaccatatataaatcctctacttcagccagtctgttttttgtccattgcttactctggatgtgtgatctgtgttcttggtatatcccacttccttgaacatcattctgcaatttggaacttccaccccctgcatatttaatacatgtgttaggttgttctcttgaatgtggaaaactgaaaggcagtttcaatgtttatctcttagaggccattcttctgtttcctatctacatttccacagactgctgcccctaatttcatcctacctataaatcctagagctatcattatctctgagacaaaacatccctattttaaaaatctaaattaccacagcaatcagtgtctacatcatttgtttggcatagtgacggactattaacactaagtcgattcattctgataaagtttgtttctaaaaatagatgttaaatttctgaaagccaggtataattttatcgcttcttgttttttttctttccttcttcccttacaaagatcagtaatgctcatatttgagtttgagatccccttttcaatgtaaatatttctcaaattcctcttacctcccaacaaacaatagtattgacattctggggcttcataaattcagaaaacatcatgactagtagatattataatttcatgcttttgaatttattagaattgttttaatgataacagcttctacatttcaatgtaaatatttctcaaattcctcctacctcctaataaacaatagtattgacattctggagcttcataaattcagaaaacataatgactagtacgtattataatttcacgcttttgaatttattagaattgttttaatgataacagcttctacatacgtttaataataatacatatgtataaagcaaaataatgatgatagctaatatttcgggcctcaacatatactagtgtttttatatgcgttgtatttaattaaaaaaaatcttaaaggaatcacatagacctccgtttaaatttaggctctaccacttgcagctgctacaagtttgatttatataatctttcattgccaaaacgggtcagattcagaaccagcctcttcagggtaactgtgaggatcaagaaaatcacaacagccgaagtgctttacagtgtgcctggcataaaacaaactctgagaacattttttaaaaaatcctttcaaggtaggcagtatcattccttccccctcatttcatagatggggcaattaaggctcagaaaggcacgtcgcttgtccaggatcttggagtggtggaattaggatagggcattctggactacaataaacacctgagcgtttagctgctgtgttctgagctcccacagcactttttcttacaacacaaactttatttacatcacactccacttccgcatccttcactaaaatatgagctcttcaagggcagggactatatttttgctaccgcagtagttagcgatacacacacagaatatgaggaaaaagtgtctgaccaacgatcaatgcactcacgactgaacctacggtggcagattgcagtgggatagaagagctttatgtgaattgcgtactgagatgcagacctactattttgggaacaatttgtttttgttgttgaaacccagaatgcaattcttctttttacctttattttgcttaaaaagttattccataattataaactgcgtaaaactagaagaatgcccttgcactcaactaaaactgacaggtgttttacctttccagtcaggcacattgaaggccttgtgactttattgatttttgttttttaaagggaggacctgccaatttattaatcttaatagagctgtaacaggagagtataaataaaaagatagttcagagaaaatttactgaaattaagtttggattaaaatcatctggctcttttaaggaaaagggacattaaccaaaagtggcgttaactatcaacaatatttatgattctctcactcagtagatacataatgacgtctggcaaattgtttaacttccgtggaacaatcccctcatatgtaaaatcaggaggttggactacattgtaagtgtccttttgtttccacctcttcgtgaccgaatgtggggtgaggaaggggcaaaaaagcgatcccggtcttggctccttcttccggcacgggccggagctgacacccccacggaaaaccgcacagcgcctccgctctttctccacgggctgagggatcaatgcacttccgcataggcctagggccccacgctccgcgatcagcgccggaagcgcacggcatgctgggatttgtagtcctccacctgtggccggcaggcgtttagaacgcgaggtctagttggcattctgggatacatagttcctgggcgggtgggggcggattcgttggtgtaatctcttttcggcttaaagagccagaagcgacaccacagactccggcgggtcacatgactccagtctagctcgcattgcggctcccgcccgggcgagttctcgcccccgcgcggccgttgccgaggagacggcgcatgtcccgccgcgcgttgccccctctgcagtacccccgcccctcttctcccaccacaatgagatcctaagatggcggtggctgcggcggttggcgctgcgtagctgaggtcgaaaaggcggccactggggccgaggcagccaggaaacgtgtgggcctctctgctgcggtctccgagggccgaccgctgccggcggcgggtcgtgggggctgactgtcgctctgcctttgacaggagaggctgcttcttgtagaggtaatgcctgcgcgtccccagcccttggcaacctagggcggcgcgccccagaggcgggagagtaacggctccgggacactcggccctgttgggtctggccacgggcccacgcctcctctgtaggttcccgggtcttcctgccccgggcttcccgtgccctaggcggtcagtccgcccgctccctcaggactgatcgccgggatccccgggtgagcacctcgcgacgcgttggtgattgcaggactcccttcttgcctcctcgcccctcctgctggccctgtcggggaggctgttctgcgtcccggtggctccggctataccccttgcgggcggaggaagcggagcggggactctggtttgggtgctaggggcactgggtcgagttcttagagaaacaggccttggtggccatagttcttccccgcgttccctctgtggaactctcggtgtccagagtttggggtgtagaagggcggatgaggagcgacgcgactctgaagagttgcagttgggctgtgagctgcaggatttccgccgtctctggtgctgtgggagccgatgggccgggggaggcgttcctgggaaggttaatggagtaattattgccccttctttctcccttcctacctatctagttagaattgggcctagaaccgggaaagactaaatgccaagtgggactgggggaaacgttgtttggtttacagaaactggcgtttggggattaggccccgccagggaggctgggcgcgccaactttgcatccctcagcctactccccaggaactcgcctggtttaatt

SEQ ID NO: 182 - DNA, 6000 bp, Homo sapiens; identical to SEQ ID NO: 24

SEQ ID NO: 183 - DNA, 6000 bp, Homo sapiens; identical to SEQ ID NO: 14

SEQ ID NO: 184 - DNA, 6000 bp, Homo sapiens
gagcatgctcccgctgcagttaactagcccaacctatttctttaattcagcccatcccttcgtttcccttaagggatacttttagttaatttaatatctatagaaacaatgctaatgactggtttgctgttaataaatatgtgggtaaatctctgttcagggttctcagctctgaaggttgtaagatccctgatttcccacttcacacctctatatttcctttttttttttttttttttttgagacagagtctcactctcgcccaggctggagtgcagtggcacgatctctgctcactgcaagctccgcctcccgggttcacgccattctcccgcctcagccttccgagtagctgggactacaggcgcccgccactacgcccggctaattttttgtatttttagtagagacggggtttcaccgtgttagccaggatggtcttgatctcctgacttcgtgatccgcctgcctcggcctccgaaagtgctgggattacaagcgtgagccaccgcgcccggcctcacacctctatatttctgtgtgtgtgtctttaattcctctagcactgctgggttagggtctccctgaccgagctggtctcggcagataaggtttcaccatgttggccaggctggtctcaaactcctgacttcaggggatccccgccccagcctcccaaagagctgggattacgggcatgagtcaccgtgcccagccaattttcttttgttttttcttttgagacaggatctcactctgtcacccaggcttgaatgcagtggtaccatctcggctcactgcagcctcaatcttctgggctcaaatgatcctcccaccttagcctcccgagcagctggggctacaagtgcacactaccaagcccagctaattttttttttttttttttttttttgagacagagtcttgctgtgtccctcacccaggttggagagcagtggttcgatcttggctcactacaacctctgcctcccgtgttcaagcaattctcgtgcctcagcctcctcagtagctgggattacaggcacgtgccaccatgcccagttaatttttgtatttttaatagagacggggtttcgccatgttgaccaggctggtcttgaacccctgacctcagcctcccaaagtgctgagattacaggtgtgagccgacatgctaggcctatacatttcaaaattatgttgctatgttcataaagatgtatatatggtaacttgtaccttcaatcaacatgaaatacccttctttgtccttttaatgcctttatgataaattctgtctcatattaatattgctacatatgctttctttccataaacatttccataaacataaaaatggctggtaagtcattttccttttttttaaaaaaatttttgttttttagaggcaggagctcattctgtctcccaggttggagtacaatggttcaatcatagctcatagtttactgcagcctcgaactcctgggttcaagggatcttaccacctccgtcttccgagcagctgggactacaggtgcaagtcaccacgcctggttaatttttttaaattttttgtagagacaaggtcacaatatgtttcccagcctggtcttgaactcctggcctcaagcaatcctcctgccttgagaaatatagtaaacaaaaaatgtgaaataacatggcagaaataagtccaaataaataaataatcaaaaataaatacaaatgatttatattctcttcttaaaagagagctctgagaaaccccaaagccagctatatgttgtttataaagagacatacataaaacaaaacagcatgattaagaagataatataacccattcacatttatgttttattatttatatatttggacttattcctgccatgttattttctgttttctgcttaccagtgtacagtatttttctgttttcccttttctggaatgcctatttatttctgttcctgttttgtccaccctttcctgactgattctttctgaataatgactttttttttttttttttttttttttgagaaagtctcactctgttgaccaggctggagtgcaatggcacaatcttggctaattgcaacctctgcctcccaggttcaagacattatcctgcctcagcctccccagtagctgagattacaggcgccccccaccatgtccggctaatttttgtatttttagtagagactgggtttcaccatgttggccaggctggtctcgaactcctgatctcaggtgatctgcccacctcggcctcccaaagtgctgggattacaggggtgagccaccgcgtttggcctcaaagaccgagaactttgtaatttatatattttatagctcttatcacaggtgtctagtaaatatttttaaacacttatggcacctgatgcaagaattaccaggttcattttatagagaggatatgaaactgtccaagggtttggactcacatgttcaagactgcatggacagcaatctgtagtgggtcaaattattgtttttagtatgatttaaagtgtttgtcaaaaatataaaagttttgaaaacaagctggggaagtgaatttcaatatcgcattaactaagatcaaagtgcaattcatcaaccttttttccccatcccgcaccctgtgctttctctactcagttactcactacaccctgctggactaaaagggtcctccagcattttctttcttacacagtgaaagacattctcttggcattaataaatgttcacttaataaataaaaagggccgggctctgtggttcctgcctgcaatcccagcagtttgggaggccaaggcaagaggatcgcttgagcctaggagttccagcctaggcaacgtggcgaaacccagtctcaaaaaaaaaaaaaaggaaaaaaaaggcatcaaaaaataaaacgtaacaggtggcatgacatgacatgacttttctaacagcctcttacagctttccaaggtcttttaatatgaagctataggtctcggctagaagacacctccagacttctcccaaaacatttcagaggcccggagtaagtctccccacatctgaaggcacatcagaacccaggtggcccaagctgatgagagttaaacaggaagttggtttcttggtccggcagagactccaatcacccccacctcttttccaacccacaggacagcacgtgctcaggaggctctggagttgggacagcccagttaaaaaaaaaaaaatcattgatttccctcccaacgaagagggagaaaacacgttaggagactcgtggcccagtcctggcaaaaaccaaaactatgtccctttagagggcttagatatcaagagatggacttgcttttagttctttttcccatcctgttccctccctaccaaaataaaattgaccagctaatccgacttaataacactaaagaattacttaggaacctgctatcttaacatttcactttttgcatatcctccaaataccaggtagcagtcttactactgtttgcacccctagaacctggaatagtgctgcccgcagaggaggaagcaataattacttgttagagaaggtattgctgtgcatttctggggaatttcacattttgtaatttgctttaaaaaaagtggacaggcatatttacgggggtttctcggacttctccatgttaatattcgtgtgtataaatcgctcccgtgctgctctctgggggcccctctttcacaaacacctggccaccctcacgccacaatggccaggcaggaacctcgacctcccctcggagagggggctcagggtcaaccccggggtctcagtctctacatgtgacgttttcctgtcccctcatttaaaataacaagaggctgggcgcagtggcttacgcctgtaatcccagcactttgggaggccgaggcgggcgatcacgaggtcaggagatggagaccatcctggccaacacggtgaaaccccgcctctactaaactacaaaaaattagccgggtgtggtggcgggcgcctgtagtcccagctactcgggaggctgaggcaggagaattgcttgaacccggaggcgaaggttgcagtgagctgagatctcgccactgcactccagcctggtgacagagcctgactccgtctcaaaaaataagaaaaaaaaataaaataaaaataatagaggccgaagcgggaggttcacttgagctcagaagttcgagatcagcctgggcaacacagtgagacctcgtttctatttaaaaaataaaataaaactaaatttaaaaaaatgcacgctcatagtacaaactttagaaatggaacgaaaaactaaaattgaaggtattcccctccaacccagagataacacctatcgtttattaagccctcactattgttaaacttagttttaaagggcacgatctcatttcttaaagacttctattccgcagaatttctttccaggcttttttctttttctttttttgagacggagtctcgctctgtcgcccaggccggggtgcagtggcgcgatctcggctcactgaaacctctgtccagtcttttcgaacccaaggcccaactgcgctctatctcgactttcggctccactcggatcccgaagtggcgcacgagataaaatgttgtcaggctgaggtaattctctgttagtcccggtaaaaattcgtcagtctggaaagctctcggtttggaattaaattctgtcactccggatggaaataagtccgcttaaggggggaaaatccgtttgtggaggacacgctcccgcacgtaaccccccgcggaaaatgaccccaagtacctttggccagggattgccgctgccacgccggactccatagccacggtcctgaaacgccccgccgggcaggccggaccaatggacgccgagctcggccgtgcgtcacgcgacgctggccaatcgcggagggccacgaccgtagaaaggccgggcgcggcgaggctgggcgctgggcggctgcggcgcgcggtgcgcggtgcgtagtctggagctatggtggtggtggcagccgcgccgaacccggccgacgggacccctaaagttctgcttctgtcggggcagcccgcctccgccgccggagccccggccggccaggccctgccgctcatggtgccagcccagagaggggccagcccggaggcagcgagcggggggctgccccaggcgcgcaagcgacagcgcctcacgcacctgagccccgaggagaaggcgctgaggaggtgggcgaggggccggggtctggggccagatctgaagccgggactagggacaggggcaggggcaggggctgggagcggggacccagcactggccgccccgcagggctccgtcgcctttggcctggcgggtcggtgccagcgtggcgcggggcggggcaggaagcccggactgaccggatccgccacgctgggaacctagggcggcccagggctcttttctgtactttttaactctctcgttagagatgaccagagctggggatgcgggcacctgtcttccaggccctcttgctgtgtggccgcagactggtggttcagcctcttaactcggacatgaggtcgaataatctgttttggtttactgctatttctggagaggcgcggagctgaaataacagagctgttgaaagggctgggaattctgcgaggctcactggtctagctcagtatctgcgttcttaaaatggaacctacttcatgaggtctttggggagattgagacttggatataatgtgcctagcacttagtcctccgtaaatgttcactcttttgtgatcattgtgccttctgtgatttatgaagtgtctcttctgagttaattcttttaaaaaaaaaagtgtctcctccaacagacacggacccatcagcaggtcactgcctaggatctcaacactagagatcagggagtggcatcagcctctcccttttctaaattggactgggg

SEQ ID NO: 185 - DNA, 6000 bp, Homo sapiens; identical to SEQ ID NO: 30

SEQ ID NO: 186 - DNA, 6000 bp, Homo sapiens
acagagttttttgggggaggggaataaaaaaattctggaaataggtagtggtgatggttgtacaacattgtgaatatacttaatgccactgaattatatactttaaaaatgttaaaatgaaaattatgtatatatattttgtgacaataaaacaagctttaaaaataaagtaactgaaaataaaagctcaatgttctcaatagaatggaggagaggaatgaatcagtgaacacgagactagaaaaataattacctaatgtgaacatcagagagaaaatagatggaaaaaaatttgaatagagcctcagagacaggtaaaactatgttcgacaaaaaagtgagagaaagtggtgctaaaaaaatttgatgagataatggctgaatttcccacaaatttgacacaaagacataaaacagatgaaagaaggtgatggaatacctaacaggagtcacccaaagaaatgcatgccaagacactaaaaaaatcctgaaagtaaccagagagaaaccatgcattatctatagaagaacaccaattcaagtgacagcagttatttttcatctgaaaaactggaggtaagaaggaagtggcacgacatttttcaagtgctagaaaaaagcaaacctgtcaactcagaattttatatccagagaaagtatccttgaaggttgagggaaagtaaagacattctcagataaagaaaaattaagataatttgtgccagcagagctaccctaaaagaatagctaaaagtatttctctaaccagaaaggaagtgataaaagaagtaatcttggagcagtaggaaggaagaacaatatatagagcaaaaaatatgggtaaatgaaacagaatttctttctttcttttttttttttggagacagggtcttgctctgtcatccaggctgtagtgcagtggcatcatctctgcttactgcagccttggcctcctgggctcaagcaatcctcctacctcagccgttcaagtaattgggactgcaggcatgcaccaccatggttggctgattttttttttttttttttttttttttggtagagatggagttttgccatgtttcccaggcttgtcttgaactcccattcttaagtgatccactgcctcagcctcccaaagtcctgggattacagatgtgagccactactccgattcaaatttttttttaattttacaaaattgtatttaactgtcgaatgtggttttaaatgcatgtacaggaaatatttaaattattttattaataggggagagtaaagggagctaacaggtaaggtttctgtactttcacttgaactgttaaaatgtaggctatgataagttctgtatatataatgtaatgcctagaacaactggtagaaaaagatcaaacaagagttacactcagaaacactataaataaatcaacgtagaattctaaaaaatgttgagataatccacaggaaggcaccaaaaacaaaactcttcatgatttcaacacttataactacagtaatcaagactgtgatattggtgagggatagatacatacatgaatggtacagaacagagaatctagagatagtcctatacaagtacagccaaacgattttttgacagagatgcagatgcagttcagtggaagatagtcttttcaacaagtggtgttggagcatttagatacagggaaaacagttaccctccacttaaatctcacacttcataaaaaattaaatggaccatagatgtaaatgtaaaacataaaactatgagacttttaggaggtaacataggagaaaatttgcaggaagttaggcttggatggaaagttcttagatatgataccaaaagcatgactcataaaaggaaaaattggtaatatggacttaatcaaaattgaagtttttggccgggtgtggtggctcgtggctataatccctgcactttggcaggtggatggatcacttgaggccaggagttcaagaccggcctggccaacatggcaaaaccccatctctactaaaaattacacaaattatctaggcaggtggtgcatgcctgtagtcccagctacttgagaggctgaggtgggaggatcacttgaacccaggaggcaggttgcagtgaactgagattgtaccactgcactccagcctgggtgagaatgagattctgtctcaaatatatatacacacatatatatatatgaatatatatacttcacagaaggatgtctggtatactagaaaaagatgttcagcctctgtaaacatcaggggaatgcaaattaaggccatgatgaaataacaatacagtaactaaaataaaaaatagtgacaataccaaatgctggcaaggatgaggagaaactggatcactcatccattcctggtaagaatatgaaatggtacagccactctggaaaatgatttggcagtttttggtaagactaaacatacatttaccatacaacccagcagttgtgctcctgggcatttattccagagaaaggaaaacttatatctactcaaaacttatatcctactcagttgttcatagcggctttgttatattcccaaactggaaacaaccagttttccttaattggtgaatggttaaactgtggtattccataccatggaatattattcagcaataaataggaatgatcctatttggttcaaataacaacttgcgtggatctaaaggacgctgtgctgagtgaaagaaagcaatctcaaaagatcacatgctctatgattttgtttatgtaacattctcaaaatgacaaaattgtacacattggtgggaagaattgagggcggggaaggagaatataaaggggcagcagaagaatggtctcgttgtaatggaacagttctatatcttgaggtggtagttacagagatctgcacatgtgagaaaaatcatatagaacaccatgcacatggtgtatctgggtatgatatactatgttgtttatgacacaactatcagcggaaactgagtaaagggcgtatgagacttctctgtactacatttgcttcctgtgaatcttatttaaaaataaaaatttttaacaaaactaattgagtacctataatactggaaattttacttgagctcttatataatgtctaatgacaattctgcaaattctaggcattctgtccctttaacagaagaaactcaagagactctcatttattttttttcttaagtcaggtgcatcttctaggatcaagaaaatatggtaaattccccaattacataactggtaaagaactacaacaggatttaaacctaactctgccgaagtccagagcccatatcctttgtgttactccagactgcctcttctaaagtacttttgtcttggaattgagtaaaagtaaagttcatgagagaagggaggggagtgttcatttatattactaataatttgttttatttgcttacttaataatttgaggattatatgtgagatacgtaataaatgatgcagaaacaagtgatgtgttgatacagaaatgagacaatacagtcttttaagttgtttagaatctagtagaagggacagggaaataaatgattttaatgcatcttataaaatattgagataaacttatataagaggctttatgggcacacatactggaaaggagaagcaccaagaacatctcctggtgcagtgggaagttaacagacatttttagtgtgctcttgttgctgagaaacatggcataggaaaagccacgaacaaagatgaaaaacacaacttgaagtttatctgtttcacgtcctgtagtttgtctgtttgttttaaaagaaagtagctgaaataataagggtagggtaaaataagtaaacagtgaaagcctgggatgacaataacgaacagatcattgtacctagtttctgtgcatgttgctagaggtgggctttggattaagctttaaaatttctagaggcaaaggcaaatagaaatattagttaaataattaatgattgttagggtaagaacaaaccaggtttccaaaaaaggcacgtattttcctgaaattgaagcctaagtagggttttccttgaggattctcataaggagggttctttgataacacttcaatttcaagtgtgtacatttcaataactcccctaaaagaagtttttaaatgaatttaatgagattgttttttatagtgtgtctggtggtgggaagttaggttggacagctaagtcgagttggatcataaatggcattttaaaatttcattctcagtgtcatgaggcaacataaggttataggaatgacctcaaatttgcattttcgaagaatttttgagagcagatgggagaaggccaaaagagaagagagtaggagacactggattaaaataatgactttaattatgcctcttggtgggctatttactgggtacaataaatggcattgtagcatatttaaaaataattcatgacttaggatatttttatgtagtgacaacttataaagtttttttgaagacaactttgtttttaatggtttggaagacgataactctatagctgtttgaaaagggcaacctcagggcaagaataatgctagaactaagaggtcaggtatttagcaatttcagatgctccttacagactgaaacttctgtgtgcgagtgtttttttttgttgctgttgtttttaatgcatcttttacagggtactaacacagtatcttagacacaataggtgctcaataaatatttgttaaatacacaatgagagacaagtactatggaaaagaatttgtaccatgactttacctcgtagttatttttgttattgcacttaacatgttgtctttgtatttcctcaagtaaacaaagagttccctgagggcaggtatctaacctatctttgtatttttggaatttaatatagttcctgacataatcattgttcaatgggtctaattttttttttcctttaaaggcatttggatacctttgtgatagaaaaggcccttttcttcatccattgatggtttgatagtgggctgggaaggaaagctgtgttcctccacattaggcagcaaatacttgattgatttgatatttagcttagtcaagtaagttactgatactttcaaaaggactttttaaaaagttaataatacacatatatatacgtatatatatatgtatatatacttttttttttttttttttgagatagagtcttgctgtgtcaccaaggctggagtgcagtggcaggatctgggctcagtgcaatctctgcctcccaggttcaagcaattcttgtacctcagcctcccaagtagctgggactacgggcactcgccaccatgcccggctgatttttgtatttttagtagagatggggtttcaccatgttggcgaggctggtctcaaactcctgacctcagatgatctgcccgcctcagcctcccaaagtgctgggattacaagtgtgagtcaccatgcctggcctaaaagagttaatatattttaataacaataattagaaatttaattaaaagaactcttaatggtattaaaattaatttcaaagctattgaagtttctttattgcagatataaatatttggccatttttctaatagattggctaaaaatcaatagtaattaagttctttttaaaataaactataaattgtcttgaaagatattgctataaaatttaaaatgtttatttaatatattttttcaaataggtaatacattcacatggtacaaaattcagaaggcacaaaaaggtatagagttaagtttctttgccagggaagcaaatctcccttcctgattccagtcacacagctgctccccagaaaaaagctaaggaattattttaatgtgattttttttctgataataacagattgaagatctcaaacagacaaatcatggcttggaagaatatgttaggaaactcttggatagtaaggaggtggtaagcagtcaagtaga

SEQ ID NO: 187 - DNA, 6000 bp, Homo sapiens
gcatattccaggcatatgcaaagacaaagagtcatctaatagtaaggtatgtttggggattccctcctaagagaaagagttacactactagtcttcgacttccacttaagcctatggctatactgtcctaggaagcctcgcaaccgagactgcattactttggttaacctctttgttcttggttctgcttgactgactttgacacagtaccatattcattcaacaagtatttatggagttcctactaggtacaaggtaataaggagatagaaaatgggaggagataaattcatgtaatgaaccaaaatatttggactttttaaaaggcagctaagatccactgaagtgttaagcaggaagtgttaactcagctgttatacgaatctgcctctgcagggttgagtatggattaaataaaggatggactagggacagggggaacagttaatggactaaggcagttgtccatgctagagataatgagggcctaaagtacggtaggagagagagagagagagaaggggatggatatgagtgacattaagaaggtgaactggccgggcgcagtggctcatgcctgtaatcccaggactctgggaggccgaggcaggcggatcacgaggtcaggagatcgagaccatcctggctaacacagtgaaaccccgtctctactaaaaatacaaaaaattagccgggcatggtggcaggtgcctgtagtaccagcagctctgggaggccgaggcaggcggatcacgaggtcaggagattgagaccatcctggctaacacagtgaaaccccgtctctactaaaaatacaaaaaattagccgggcatggtggcgggcgcctgtagtcccagcagctctggaggctgaggcagaagagtggtgtgaacccgggaggcggagcttgcagtgagccgagatcgtgccactacactccagcctgggcgacagagcaagactccgtctaaaagaaaaaaaaagaaaagaaggtgaacctgtccttgccttcaagaaacaagtacctccacaatctagtgggagatactaaaaaacaagtaaggcaataattaaaatacagtgtcctaaatgctgtgataggtgttaagtacagtagagcgccatctaatgctctaattagtggatgtgacattgaagctgagacataaaagggataaagaaaagaattctaacaatgtgcaacagcttagtggaaaaggagataggacccatgcaaataatttaattctactggctggttattaggaatacaagaatggggagttaataagaaggcaagagaagtagatgttagattataaagaaccttaaatccaagtgaaatgcttgaactttattgcccaggatggagtgcagtggtgtgatcacggctcactgcagccccgacctcctgggctcaagcaatcctccccctttagccagcatgtgccaccacgcctggctattttttttttttttttttttttgtagagatgaatctcactttgttgtccaggctggtctcaaactcctgggctcaagcagtcctcctgccttggcctcctaaagcactcggattacaggcatgaaggctttggatttatacttcagggacaccgcctagagattttaagcatggagaatgtacaatacttggcaataggttgaattagggtgagagaaagagaagtcaagcatcatgtcctttatgatataatgattacaagctcaaaccagagtgccctcattcaaatcccaactctatcctttatcagttgaatgacctaaggcagattacttttctatgtctcagatttgttatctaatatgtggataatgacaggactcatctcatattatcaggctgagtctgatgagctaatacatataaagtggttagaagagtgcctggcactgaagaaagtacacaatatgtgctaactattttattaatattatgccctgatttctggcctggcaaagaggtgaaatttcctaggacagattttataggaagaggaagtatggggttaagataattggttcattttgactgttgaactagcggccaacggcacagagctcaatggatggtaactgaggccacaggaaggtggttcagtgagaagatttaagggcctgcgacataagactgaagagcagcaacatttaacggacatacagaagaaggagggagagctcccaaaggaagctgaggatagaagaaaaggcagaaaaattttaaatatgctattatggaagcttcaaggagacaagatggtcaacagtgccaaatgccaaagattgagcaaataagatgagggttgaaaaggatctattaaacagtatcaagaaggttatcagtgatcttggtaagaaccagatgtactgagtaaataggaggcccaaggtggatacaatgagggtattctagttgtgaagtggaaaagctagggcagtaggtagaaaggaatgtggagttaggagaggacttaagatgcaatagatctgagcatgtttagatgctggtaggggagtcaagagagggcaacactggagaagggaggtccttgagaaagtgatggtactgggatccagagttcaggtaggggcagccttaaaggagaaagtaacaaataggagtggtggtcactaataagctggatggtgtctgtggatatggaaattgtcaaagatcttgtgaaatatcttttcccaagattaaggctcttactcttgtctgcatgtgcagagtgtggcaggatggcaaagtagttaaggacttaaatttttaatcctggctctgccacttactaatgactttagggaagtggtttaacctctagctgcttcagtggcctcagacgtcataaaatggttgagagaattaaatgtgttaatatgcataagccattcatgtttggcaaatatgaaatgttaactgttatgacagggttctccctttcccatctctattctgtgcttactgttcctatcatataccatgtattccctcaagtgaacaaagattcctaaccaagacacatcaaagtggcatttaccttgataaattaactatagtccaagatattgactttggtcaaaaatgtgatcttgttagggttccagaattgatccaattcatgtattgagccaatgcatgtattttaatagtgctaaaaatatctctcttcatccaggtattgtatatacagtgtgaataaaacacaacaaaggtattaattcaacaaagttttcatcaattacatgacagacattgttcttagcacttgggaatcatcagtgagtcaaatgaataaaggtgataaggagggctattaaaaaaagtagatggccgggcgaggtggttcacacctgtaatcccagcactttgggaggccaaggtggacagatcacctgaggtcaggagtttgagaccagcctggccaacatggtgaaaccccgtctctaccaaaaatacaaaaattacctgggcgtggtggcaggcgcctgtaatctcagctactcgggaggctgaggcaggagaatcgcttgaacccgggaggtggaggtttcagtgggccgagatgggctgggcaacagagcgagattcagtctattaaaaaaaaatgtagagctgataaagggaggattgtaactgtgtatgtgagaaaacttacattgcaattttaaatagggttgttaggctaagcctcattaaaaaggcatcatgtgagaaaagatgcaagaagctgttctaagcacctgaacacgtaaaccaataaacagacctcagtgaggatgtgacatttcagttgaaccccgaaagataagaaaaaatcacacagagtgagaaaaagtgaaaacaaagggatgtccaaaaatccctgactgccagcttattgatttacaaagagaactatagaccatctatcagatattcagatgagcctgtgcaattattcactgtaggtctggtgacaagccaactcttaagtttgcttggtgaatacataatcagaaaaggactgagttacatgatatgaacgtctgacggaatgggctctggggaagacacttccttaactcaggagagcccctgctcttaagccgggataccctctctcccctagagaaggcgtggattcatctggcacaggtgtgcccctctttttttattctatgctccagtagcggatcagaccccgactgagtaatgcacggtatttcaggatatttcacagtcgttgggatagtgtcaagcctttgaagttctggttaaattttgttccttcaaaatcactttgaatctttctactctcaccctttaatgactaattttttgaagtttttcctcggaagacttccttaccttccatgttcttgggacacttcgctacctctgcactgccaaacacggctccccatcactgaactgaaagcgaaaacagcacaatcccatctatctttctaggcaggcgcagcttcttcataagacctcgccaagaccctattattttgtcccctctctaatgatatacaacttactcagaatctcattacggtcgtgtgcatgttttacttcgcccttttggctcccagggggcgtgcacacagctagcgtccaacatgttttacgatatttaccctccctcctgtgttcgggatcaaccgttcctaacagtgaaattaggtcgtcccaagtgctgaggagaaagtgtgcacacaagaggcttcaacaccggcggaggcgacccgcaagtcctgacccaccgccagaaacaccgcgcgcgcccaagaccccacggccgcccacgcgctacggcccgcaacatcccggtttgaagcgtttccgcttcacccacctgcggcttccggtcgtacccacggcctcgtgagggctcgagctggaaaagtgcgtcatacgaccccgagcaaccggcaggccttgcgcgcgatgctgccccgccccctgagggccggccccctgaagcgcaagagaaggaggggcgcgcagggatcgcgcctagtctctccgcctgcggagccgtggggtcccggcagcccgcaggagtgctaagtaagggtccttcagggcgggaaccaggttccaggcagggacgcaggctacgttcgaataaaagtaccgaaggtcataaggccccagttcagatgggacttccccgcgtgacagcacagagataacggccagccctgggcgaaggtaggagagcgggcgtgccaggttggaggggtcatttcgtggagcgagtttagggggagcccccagaagcccagagcagtcaggtcacacgacgggcaggaaggagtaccagcaaatactttttattgagcatacaggtattacgctgggtctttacatatctcctccaaataagtgagtccaaatggcaggtaactcgaaaggtgagaaattcaagtcagctttgaaagacacattgcatttaaaggaaaaacggtattcgcagatgataatacaggatggagtggatcagaaaacacactgaggctactgatcattcccatttgccaactcactgcagttggcaagaaaactctgtgactccatgagatgggaaattacaccagcagtcaaggtagcaaggtaatagtttcggctaagttttgctgcataacaaactgcctcaaatagtggtttatatctctaacgtgggcaaggtgggtgattcttctgctagtttctcctgggcatattcatgtggcttcattcagcacaggttggctacgctgggcggtccaagatagccttattcatgctctggcaggtgctgcctggctgctagggcatctcaattcaggcctaatcttggaagcagcgcctcagccatattctattggccaaaacaacaacaaagccagcccagagttaaggcgtggggtaatggacttcacctcttgatgaaagaagcccaaagaatttgtggtcacctttttcaaccttgcacagaaattaatct

SEQ ID NO: 188 - DNA, 6000 bp, Homo sapiens
aagaaaatatctgttaccttggagtgaagaaagatttcttgaacaagactaaaaagcttaaacaataagggaggaaaacagtgagtttgattactcataattgagaatttctattcaatgaaaaaaatataaacaaaaagatagataagagactggaaggagatattttctgtgtccaaagctgatggtatttaatggctggaataaaaagagaacacctagaaattagcaaggaaaaagaaaacccaatagaaaaatgggcaaaggatataaaaacataattcacagattgaggaatcccaaacagataattaactaggaatcagagaaattcaagttgcaaagaaattgcaacctccgcctttctgggttcacatgattctcctgctgaggcctcccgagtagctgggattacaggcacctgccaccatgcccggctaatttttgtatttttagtagagacgatgtttcgccatgttggccaggctggtctcgaattcctgacctcaagtgatctgccctccttggcctcctaaagtgcttggattacagcatgagccaccgtacctggccacatctggctaatttttaaaattcattttttttgtagagacagggtgtcactgtgttgcccaggctggtctcgaatgcctgtactcaagcaatcctcccacttcccaaagtgctgggattactggcgtaagccaccatgcctggactggtttgaaccttttataacaaaacccagatcacagcagtcctctgctcaacacactctagttgcttcccatatcagagaaaaaaattatctacatatctggtccccagctgtggtaggcagaataatagtcttcaaagatgtctttgtcctaatccccagaagctgggactatgttatgttatgtggcaagggggaattaaggttgctaatcagctgactctgagggtgggaaaattctcctggattaattgggtggtactaatgtaatcacaagggtcttttttttttttctttttgggacagagtctcactctgttgcccaggttggagtgcagtggtgtgatctagggtgactgcagcctccgcctcctgggttcaagtgattctcgtgcctcagctcccaagtagctgggattacaggtgcctgccaccacgatcagttaatttttgtatttttggggagagacagggttttgccatgttgaacaggctggtcttgaactcctgacctcaagtgatccacctgccttggcctcccaaaatgctgggattataggtgtgagtcaccgcacctgccacacaagagtctttagaagtgaaagagggaggtagaatgtgttagccatgatgcaatgtgaggaggacttgactggccatttttggcgttgaatatagactgggatcacaagccaaggaacatgggctgccagtagaagctggaaaggcaagaaaggggattttcccctagagcctccagaaggaatgtagacctgcctgacatcttgattttagcccagtgagacccaatttgaacttgtaaatctccagaaccgtgtgataataaatttgtgttgcttaaagacaccaagtgtgtggtaaattgttgcacagccgtagcaaacaactctactagcaagcactctctcctgtctctttgccttattcgaccccagacctatcaccccattgctgttcctcaagcatattctatgccaaaccttctcctgcttcaggacctttgcacttacagttcccccagcctgaagcaatttttgcattgcaaaccacatcccttgaggatagttagtgacatggggcctggaactgtgaagaatggcagacttctgctgctagtcatgatggagtaacagagaccagacttatcctcatgctttcagcatcttttttttttttttttttttttgagacagagttttgttcttgtcccccaggctggagggcgatggcacgatctcggcttaccgcaacctctgcctcccgggttcaagcaagtctcctgcctcagcctcccgagtagctggattacaggcatgagccaccgtgccccgcctgctttcagcatcaaaacacaaaacacatgaagcaatggcttttagatattggacaacaggcagttcgggagagtgatccttgagaaacaggaaataaagtgagccctatgaatggacattgcctggaactttcaggcctcggcataaggaggaaactctctgatttaaaaaacggaacacaggccgggcgcggtggctcatgcctgtaatcccagcactttgggaggccgaggcgggcaggtcatgaggtcaggagatcgagatcatcctggctaacacagtgaaaccccgtctctactaaaaatacaaaaaaattagccgggcgtggtggtgggcgcctgtagtcccagctgctcgggaggctgaggcaggagaatggcgtgaagccgcgaggcagagcttccagtgagcggagatcgcgccactgcactccagcctgggagacaaagcgagactccatctcaaaaaaacaaacaaaaaaaaggaacacagcatcagtgagctgtggaacaagatcaagtggcttaacacatatggaattggagtcccagatttttttttgaggggatcaggaagaggacagtgaaaacaaaacaaaaaatagtaataacagaggtttttgtagtgaagcttttgaaatgatggaaaaattaagggactagaaaaccaagaccttagaaggtgtctgtcacgagagagcaagcacagggtactatataaggcttagcctgggccaggcacagtggctcatgcatataatcccagcacttgggatgctgaggtgggtggatcacttgagtccaggagttcaagaccagcctgggcaacatggtgaaaccgcatctctacaaaaacatacaaaaattagctgggcatggtggcacatacctgtggtcccagctactcaaggggctaaggcaggagaactgcttcaacctgaaaggtggagggtgcagtgagctgagatcatgccaacgcactccagcctgggtacagggcaacagagtgagactctgtcttaaaaaaaaggaaaaaaaaaaaaagtctgggcgcagtggctcacacctgtaatcccagcactttgggaggctgaggcgggtggatcatgaggtcaggagatcaagaccatcctggctaacacagtgaaaccctgtctctactaaaaatacaaaaaacaaaaaacaaacaaaaaaaaagctgggcgtagtagtgggcgcctgtagtcctagctacttgggaggctgaggcaggagaatggcatgaacccgggaggcggaggttgcagtgagccgagatcgtgccactgcactccagcctgggcgacagagtgagactctgtctcaaaaaaaaaaaaaaaaaaaaaaaaaaggtttagttggggcagggtgggacactcactaccccttgggtttccacagagggaaggaaatttttactttctcaggttaggggagaaagtcaacagttcttgataggaaaaaaaaggaaaatcttttcaccctcttttggccttaaaatgatcatttccttatattctttccaaataatcttcagtaccgtctaggtggcatacataagtgcttaaacttttcttattctttctataagggaagtactttcctacttcctatattaataatctccccacccccgaagtcttcaactccagctgatagttttaaacttagaacattctttcctatttgtttttaataatgctagataatgtattcaaaataatcttagtatctgaagaggaaatgagattatacattattccctctaacataacttctcagtttgttattttgtgcatttaaaaaattacatttccgaggatatgtgctccttgtgtcctctaacctcttaatctaaaataacagggacacttaattttttttggtatctaattatacttacaaagtatatgatatctgaaaataaatgcgacaaaatatgagaccatgtaataacacgatgaaaagacattggaaaaacatggcatttatattaaatgtatttttatgactaaatttgttctacacaaaagttgtttatccctgccaatgatatcttgtggggggaaaaatgagtactcacctggcgaaaacaggaattgttagtctcctcaaacgagagcttactcttgaaatacacagcgttctaccatatcaaggtcatcagagaattgctgtaaaaacctagtgtctatgtcatctgcaggaaaaggagataaagtcaccattatcatccagaagctcttgagttatttaagaagggacatggtaggtattaagaaaaattaagaagacttttttcccccccattctgggctccaaaaaattggtagaagaatgcagcgctcattctttttcactaaaaagctcatttgtcactttaaggtgaggggatttggaaaaggactggcatgtggagaaggaatatcggtcaggaatctggactttgttgctagatctgccacttcctgattcagccctgatcgtgcagagctgaccaaggccgtggtccccaggctcccctgactccaggctgcccacgctcaccgggacaggccggctcgctccctgcaggctgcagcgggagggctggacctggaagcctctcttaaaacgggccctggctgcagcaggagctgcgcccgaaagcagctctgagagtaaccggttcaccgaacatgggtccagaatgatgcccaagccctgggaaaagtggcacaaagccaccgccgcgaagcagcaggtgtttcaagctgagggaaggcggggctgcgagagacagccttgcgcatgcgcgttccatccaggtgcggcagcctcaggcagagattaagaaatgagtcgtggaaaagggggctagcggctggttactaggagacgggacgctcggctcgggcgtctaggcgctgcgtgggcgtgcgcctgcgcggcgcggatgggccaggaaggggtccctcctaggtgccctgtaaggcaggcaggtagacgtacgcgtcgctccgtgcgtaggagcgcgcgcacggcttgtagaccccgcgagaaggaaggtcgagccaggtacgcgtgcgcaccgggcctgggggcgagcgggacggaagcaaagctggggcgccggggaggtggaagacgagccccactccggtacagagcgtgagggcggggccacggcggcactggctggcgctaaccgccccctcctccttcccgcgggctccgtccttcctccgatccgccggggcggggccaggacgatttgggggtgggaagggaggagaaaggggcggaggatggagagtgggcggttcttgtatcccccgctgaggccgagagctgacagtcgcggggatgagctctgggcaggacggcgggccgaggagcccggggagggacccggagctccaggtagaagctgcggaggtgcgcggggtggggagagtgctgctactggactggaaggtctctgagaaggcggctgcaagcgggcaggagtggcgggtgcggggccgtggcgggcggagttgggcgctagcagcgggagcggctgtgaggggcagcggcgggcacagctgccggccggaagctcggcagcacgagttgcccctgtttcttgggaggttaggtttgagcccagttcctatggtcactgcttcgcgtcctcccgcagctctccgcttggttgttggggagactgttcagtttagaaacgctctggaagctctggtggagccgaggaatttggaagtcacagatttgggagttcagcctgactcccgatcgctcatttctgagcctctttctagacttggggtggtgaaaggctgagattacataggcatttgcatgaaaatctcagataattttagtaaaaattatacacagtaaaggcagggaaagctggcttttgttgaaa

SEQ ID NO: 189 - DNA, 6000 bp, Homo sapiens
gcctggccaagatggtgaaaccctgtctctactaaaaaaaaaaatacaaaaattagctgagcatggtggcgggcacctgtaatcccagctactcgggaggctgaggcagagaattgcttgaacctgggaggcggaggttgcagtgagctgagatcatgccactgcactccagcctgggcgacttgagtgaggctctgtctcaaaaaacaaaaaagaaaaagaaagaaggccaggtgcagtggctcatgcctgtaataccagcactttgggaggccgaggtgggcagatcacgaggtcaggagatcgagaccatcctagctaacacggtgaaaccctgtctctactaaaaatacaaaaaattagccgggcgtggtggcgcgtgcctgtagtcccagctactcgggaggctgaggcaggagaatggcgtgaacccaggaggcagagcttgcagtgagctgagatcgtaccactgcactccagcctgggcgacagagcgagactgcatctcaaaaaaaaaaaaaagaagaaaagaaaaacattagccaggcgtggtggcgggcacctgtagtcccagctactcaggaggctgaggcaggagaatgtcatgaacccgggaggcggaggttgcagtgagccgagaccgtgccattgcactccagccttggggacagagcgagactgtgtctcaaaaaacaaaaaacaaaaacaaaaaaagaccgggcgcggtgactcacgcctgcaagtgtagcatttttgggaagtggaaaagggcggataacctgaggtcaggagttcgagaccagcctggctaatgtggcgaaatcccatctctactaaaaatacaaaaattagccaggtgtggtggtgggcacctgtaatcccagctactcgcgaggctgaggcaggagaattgcttgaatctgggaggtagaggttgcagtgagcggagatcgtgccattgcactctagcctgggtgacagagcgagattccgtctcaaaaaaaaaaaaaagtggatagaaggatatgcataggttttatacaaatactatgtcattttatttattttatgtatttatattttgagacagggtcttgctttgtcacccaggctggaatgccgtggtggcatcttggctcactgcaatctccacttcttgggttcatgaaattctcttgccttagcctcccaagtagctgggattacaggtgtgcaccaccacgccctgctaatttttctatttttagtagagatgaggtttcaccatgttggccagattgatctcgaactcctgacctcaggttatccacctggcttggccttacaaactgctgggattacaggcgtgagccactgcgcctggccctgaattaatttctacagcataattttctctcttatttttatttttttgaatcagaatctcactctgtcgcccaggctggagtgcagtggcttggtctcggctctctgcaacctccacctcctgggttcaaatgattctcctgcctcagcctcccaggtacttgggactacaggcgcccaccaccacacctggctaatttttgtatttttagtagagactgggttttgctatgttggccaagctggtttctctggaattcattgcagtaaacagaattgctggatcaattaattcacagttgaaggccaggcactgtggctcacgcctgtaatcccagtactttgggagtctgaggtggagagatcacaaggtcaggagtttgagaccagcctggccaacatagtgaaaccccgtctctactaaaaagacaaaaaatttagcctggtgtggtggcgggcacctgtaatcccagctacttgggaggctgaggcagaagaatcgcttgaacccaggaggcggaggttgcagtgaaccaagactgtgctattgcactccagcctgggtgacagtctgagactctatctcaaaaaaaaataaataaatagttggtgatggccaggcacggtggctcatgcctgtaatcccagcactttgggaggccaaggcgggcggatcacctgaggtcaggagtttgagaccaccctaggcaacatggcaaaaccccgtctccactaaaaatacaaaaattagatgggcgtggtggtgggtgcctgtaatcccagcctgaggcaggagaatgacttgaactcaggaggtggtggttgcagtgagctgagatcgcgccactgcactccagtctgggcaacagagcgagactctgcctcaaaaataaacaaaaataaacacttggtgatgaattaatactctaatttcctctggttgactgttgttcttccaattatttggcaattcttttgagcagcaaactattccctcccatcattaatttaggattgctaaacaaggcgtagggagtttagagagttttggtgtgtgtggtaaggggatgaggagtctggctaattaattgatgatgtctctctcttttgaagctggtctcactgattggtttggttttcctggtttcctgatgtggaggcagaaggctcctttacttttccctcatcccccgaacttctgtgggaaaacggaacctgctgataactcagtgaattaattgctgcggggtagtgcggtggagcggagcagggagggaccataatatcaccctccactggtgagcacagatttttacccctgctaatgttgtgtggctttgggtgactaatctgagcttcggtttccccacctgtggcatgtccaggactctgcagtcagactgcctgctctcagcaggaagcggttgcattacaacactgtaccctccttataataacacaactatggttatgacttaggcgtcgtgtggagcctcagtttcctttgtataaagaaaccaaagagctcctttctttagagttgtgaaaaagactacagaagttgatcaagccgggtgacagagtaagaccctgtatcattattattttattttgaaacagagtcccactctgtcgcccaggctggagtgcagtggcataatctcggctcactacaacctccgcctcctgggttccagcgagtctcctgcctcagcctcctgagtagctggggtattacaggtgcgcgccaccacacctggctaatttttcatttttagtagagacgggatttcaccatgttggtcaggctggtctcgaactcctgacctcgtgatctgcccaccacggcctcccaaagtgctgggattacaggcgtgagccactgcgcccggccccctgtatccttttttttttttttttttttgagacgagtctcactctgtcgccaggcttgagtgcagtggtgcgatctcggctcactgcaacctccgcctcccaggttcaagcaattctcctgtctcagcctcccgagtagctgggattacaggcgaacgctaccatgcccggctaatttttgtatttttagtagagatggggtttcaccatattggtcaggctggtctcgaactcctgacctcaggcaatccacccgcctcggccttccaaattgttgggattacaggcgtgagccaccgcgcagcccttcattttttaaaataagaaataaatgaaaaaagatgatcaagacaaactcttcatacagtgcccgctgtacaaagtaagaaattaataatggtcacgtttgtgattattatttaaacaccaagcagatattaaatattagggctcagagagggcatgcgacccgcctgaattcactcagctgcagagctggaaagagaactcaggcctttttccccacgctggaaggggtagctggggcggagaggtggggggagcggtgaagaaaccccaagcggcccaagctgtgggtctgggttgggagactcgcaggtgtggggcggggaggtaaggtgacccttgctcagcgaccgcgcccgcaagaaacgcattcccaggcctcccgcccggggtctgcaggtgacgggctggggggagcacgggaactagctagaccagtttgtcgtctccatggcgaccgcccgcgcggcgccagcctgacagtccgtccgggttttatgaatgggtgacgtcacaggcctggcgtctaacggtctgagccgctggttcagacgctgacacagaccggcccgggaagggaggggggagactgtagctccgcagctgccgcgccgtgggagggagaccctgctctgaggtctttgagaagaaaatttaaaaagcagccaaaaatgggaaaaaacattaaaaaatcacgaactgttgcaggttcaggaaatttttgcaaggagctgcaaattcaaggtggaatcgaatgcagcctcactccactgcgctctatctagttcacttcccagccacccagccccaaacttactagactttcccgaattaattgctcccacccgggagggatctgggtaggccctccgggtctcaggaacacgaacagcaacattatttaggaattgagaaagcccaggggagcagatgtaaaggagcgcccgctttaaatttcggtcctgatatttgtagatcagggtccgagaagcatcttccaagagggtccggaaacccaggctctctgggctatccagagccagccgcttctccgttcgggcctcaatttctctcatctgtgaaatggagctggagaagtgagaaagtgaatatgggaaaaactgattcctgaggtcttttcattataaggcaatgcctgcttagcttccttgcctccttccagaggagcccagtgcggccctcgcctctacccgctgccctgcccggtgccctgccaccgacccacccttgctgttctgaaacccgggtcgtctttccacactgcgagcaggcactagacgagcaggaggctggacctaggagcgcgggtcacgcccccatgccgcccattggctgcttttgaacgttctgagcccgcccctccgggggccgtggcgtgtttataaaagacaagctgtggctccgcactctcattccacgttcttaactgttccattttccgtatctgcttcgggcttccacctcatttttttcgctttgcccattctgtttcagccagtcgccaagaatcatgaaagtcgccagtggcagcaccgccaccgccgccgcgggccccagctgcgcgctgaaggccggcaagacagcgagcggtgcgggcgaggtggtgcgctgtctgtctgagcagagcgtggccatctcgcgctgcgccgggggcgccggggcgcgcctgcctgccctgctggacgagcagcaggtaaacgtgctgctctacgacatgaacggctgttactcacgcctcaaggagctggtgcccaccctgccccagaaccgcaaggtgagcaaggtggagattctccagcacgtcatcgactacatcagggaccttcagttggagctgaactcggaatccgaagttggaacccccgggggccgagggctgccggtccgggctccgctcagcaccctcaacggcgagatcagcgccctgacggccgaggtgagatccagatccgaccactagatcatccttataccgacggggaaacggaggccagagagggcgtgggcgcttgcaccacttccgtcccatccttgcgggtacctggctatgcgggggtgcctaaggagcctggaaaaagcgctcccccgtcgtgcttcctggggaagggggcgttcgctgcgctcggagcggcgtcccttccaacccgccggtctcatttcttctcgttttcacaggcggcatgcgttcctgcggacgatcgcatcttgtgtcgctgaagcgcctcccccagggaccggcggaccccagccatccagggggcaagaggaattacgtgctctgtgggtctcccccaacgcgcctcgccggatctgagggagaacaagaccgatcggcggccactgcgcccttaactgcatccagcctggggctgaggctgaggcactggcgaggagagggcgctcctctctgca

SEQ ID NO: 190 - DNA, 6000 bp, Homo sapiens
tttagttttattgaggttagcatacatataataaagtccaaaaaatcttaaatgtggagctcaatgacattttatacacacatgtacaaatacgtgtatattatacacaacagtgtaccaccaaccaaatcaagatatggaatatttccaggacccctgaagattctctcatgcttcttcccaggcaacacccccaccctaccagaggcagcccccagctgcctccagaggtaatcactattctgttgtctatttttgaacttcatataaaatggaaacatatagttatgctcttttggatgtagcaccatttattgaagacacattactttaagcctttgtgaaatacacacacacaaagatacacaccggatgactatatgtgtgaacctgtttctggactttgtttagttccactggtcagcttgccttggtcagcttgcctttccttgcgtcgataccacatatctttataagagatcttgatatctggagggataatgtcttccagatctgttcttcttggctacttttggcccttgagttcttctttagactctattctgttccattcttctatttgtctatcttcacactaagaacacgctgttttaattatcgtagctttagagtaaatcttattatctggtgaggtaaaacttccattttcttcttccttaagattattttggctattcttggccccttgcatttttatttgtaaatggtagcatcagcttgtcaatttccactacaaaaatatggtgagattttgattgagattgcactgaattcatacatgactttgagaagcactggcaactttacaatactaaagtttccaagacattacatcgtatatccttccatttatttagctcttctttcattcctctgagtgatatgttgtggttttcagactagaggttttgctaatcttttgttaagaatttttcggaatagtttatattccaatgtttaaaaattttctagttgctgttgctatgtagaaatacaactgctttttctgccgggcgcagtggctcacacctgtaatcccagcactttgggaggccaaggtgggcggatcacgaggtcaggagatcaagactatactggctaacacggtgaaaccccatctctactaaaaaattagccaggcgtggtggcgggcacctgtattcccaactacttgggaggctgaggcgggagaatggcgtgaacccaggaggcagaggttgcaatgagctgagattgcaccgctgcactccagcctgggcgacagagtgactccatcaaaaaaaaaaaaaaaaatacaactgctttttcttatattgactttgttttcaaagacatctctaaattcaatttttttttctaatttttttatttttagagatggagtctcactatgttacccaggctggtctccaactactggcctcaagtgatcctcccactttgacttcccaaagtgctcggattacaggtgtgagccactgcacctagcctaaattcacttattaatctaatagttgacctgtagattactttggattttctatgtgtacaatatattggctataatatcaactttgtttcatcctttccaatcattataccacttcttaattttcctcacttgttgctataactatacagtatagaacagaagtgatgatagtggccatccttatcctgtgtccaagctcaagtgcgggtgcaatcactcagaaaactgttcagcagtgtatgatgaacatatagatacactgcaatccagcaatcccactcctagacatatgcccacaagaaatgagtgtatgtctaccaaaagacaaggacaaacatgtccttaatggttctcttcatgagaaggccaaactggaaacaaccaaattcagaacaaataaatggtagtagactcaaacaatcatatgctatttagcagcaagaatgaacaaactattcctacaacgtggatgactctcactaacttgagcaaaagcagtcagacattaaaaagcacatattatataattaaacaaagttcaaaaaaggcaaaactaatctacggtgttagagggcttggggctggttactcaagggggaggatttaggatggcgctccaggggctttctggaggagagataaatttcctgttcttggcctgagtattgatagacagctatgttcactctgtaaaaactccctgagctatgcacttgtgatttgtgtgcatttttgtgtatatttcaattaaaagtttattaaaaactacatatatttaactgaagttcattctcactgtaatctgtacaatctgaatttgtataacaaatgtctgcccagctctataaatgtacagctcttgtagacaccaggcttttaggctgtattttgatatgcttgtgcctctgaagttctagctataagggtagtctgtttgtgctgctataatgaaatagctgcaactgtgtcatttgcaaataacagaaatttatttctcacagttctgaaggctgagaagtccaaggtcaaggcaccagcaggtttggtgtctgctgaaggcccattcctcatggtgccacctaggggccttcacatggcaggacagaagggcaaaaacggcccaagctaattccctccagtccttttatgaggcactaatcaaattcatgagagcagaaccctcataacttaatcacttccccaaatgccaacctcttaatactgccaccatgaggataaagtttcaacgtgaattttggaggggacaccattattcaaaccacaggaggggctatgggtagtaagtagagttttctctgaaaggggtataaattatacattgaggggagagagcctcttaaacagtatactaaagtgcagaaggcaggccttgttccagtgaaagaagggactccaaactctcgctatgcttcatttcctttggtctagagcagtggttcccaaacagggattgaaggggccaaggagtaagttgaagacattgctatgaatccaaatatgtaatccaccaagcattatctgtaaaatgagtatctcatacatatatgtactattatttaaaaatacactttgctacttaatttcataattcttttaaatgaatttgtaattttttaaattaatagactttgttcattatatatttcctcaaatatataaacagtatgcacataaaagtatgcctactatcaaaggactttgaacaatttgggggcaatagggaagcctgacattttaaaatcctgagaacttctgatcttgacttcaaaaggggcaaaagtctacatttggggtcctttagaaacagcaagctaggaactagttgggttgggagtcacatatgtcggagagaccaagtcatatcttgtcagcaggatatctcgaagcaagttaacctctgttttctttttacccccgggcttcagtgcagccctgtataggtattcttctggagcaatcattctcaaactctgggggggcacaggcatccccaggagagcttgcttaagtagtctcctggggccccaacaccagagattctgattcagtagtttggggtgaggccttcaaatttgcatttcaaagaagctcacactggatgcaaatgatgctggtgtgagaaccactgttctagattcttcgctgcactcagcaaactaagataggcaaatacagctcccggaaccagagaggctgacaaatgaattccaaagagatgctgaatacttggcgataagaactgctgctttgagataaagatgctcctcctttgtagaacacagtattttttggttggaaagcaatctgatgagcagactaatgcgaacattcacaggatattctgggagataccatgcctttaatcaaaataatcagattcaatgacagaatttcagaaccaaggaccattagacattgtggggtctttcgggggaagctttcctgtatctctaaatcatactatgtaagtagaaagcttgctgactgcttttttgttaatacgatttcttctagcttccgtagccaacttttttttttttttttctggctagggttttcattattttatgtgattaaggacacttttctgccccaagtattgtaatcctctcggccggctctgtccaaaagaactgtcttcgatgatagaaacgttctacatatgtactttgccacatagcagccactagccatacatggttatggcacacctgaaatgtggctggtgccactgaggaattaagttaatatttaaaatttaaatcccaatactggacagcacggctaaacctttcctaacccttcacgtttcttatgaagattatatagcaggatattacaagcactaaaaaagaactatcttaaatctgaagcaagatgatttccctaactagtacgtttgtttggtaaaagaggacgtgctattttttacagttaaatctaattcgtaagttgtagaacgttttcttaacaaggtatccctctcccaaattccgggagaggctggctgcctttccttttgctccagcggtttatttggcataaaatctgcaggcttacaggagctgacaccagggcagaaaagaatgaggaatttgtttccaagttggtcacaggccgctaatctgacctagatgatgtttaaaataatattcaaatacagcactttaaaaaactatgaaggctgagaagaaaacgagaaatgggaagcaagaaggaaggcggagcgtgccggcgacttctcaggggacttcctcagggagtcccattccagtaaccccgcgctacccacggaccaccgcctctctcttgtcggaagacgcaagcccaaggggcggctcacctcgtgccgcgcgcagggaccacggccgccgggtggtcccctggccccgccccctcccacctgggcaccccgagccccgccccccgagcgccccgccccgccccgccgccgacttcgcgccgcgctcgggcgccgagtctgcgcgctgacgtccgacgctccaggtactttccccacggccgacagggcttggcgtgggggcggggcgcggcgcgcagcgcgcatgcgccgcagcgccagcgctctccccggatcgtgcggggcctgagcctctccgccggcgcaggctctgctcgcgccagctcgctcccgcagccatgcccaccaccatcgagcgggagttcgaagagttggatactcagcgtcgctggcagccgctgtacttggtgagtcgcggacccacgcggcagtcgccgacctcctccgagacccggactcgtgccctgtccgcagggtccctcccgcctcccccgcctctcgcctctagcctctcgctcggggcggaagtggcggcgcggtccgcgtcaggggcgcgcctgcgctgaccgctctcttgctccttttggtttaaaaaaaaaaaaaaaaaaagcatacttgagctgagcagctcatggttagcgcaagcgcagttagttctggagggcggtgccacagcggcttcttggggagcgcgtggatgcgccaccagcgttgcgcggcccgggtctgggggtccttgggaaagccgtgggggcgctcgggcgcgcgcccccgggccgcagcttcgccgtagctcccacgccgctgtgcttggttcttgctcgcggacagctctttctctggccgggtgttttgtggccgggtgggcagctggcgtccccgggagcggtgagggcgggggcgggcgagccgggccgcggcgtccgggtccagctggcgcccgcgcaggacctgtgggagcaggccgctctgggcgccgggccggccgccgcagccctctgcgaggcgaagctcgctctcctggcggagccgcggtggttgggggtggctcgtggcctctggcgagggcagcgctctcgggaccctccgtcttcattttcccccgtggcccagcagcgcccagcgtgggttcggcccccataga

SEQ ID NO: 191 - DNA, 6000 bp, Homo sapiens
caaagatgccctggctttcaggagccagttggatgcagaagaatgcatccaaacattaagcatgtaaaccaagcaacatcagcaggaattcacccaagcattgtgtatgggttgggcacaatggcatataatgtagctgcaaccttatgtatggcctgcaaatcctgtgccagccagtaatctcctatgggctttaacaccagtaacaatggagtgttccaaggagaggcacatctttctattatcccaaatttaaagagccggactatatgctttgtaatcccatgggtggcttttactgggatggaatactgacgaatttgcactgggtaagtgtctcgcagcagttccaccactacgggggcctgatttatggctagctctgggagactgtcctccacccagacccctgccaggttgagaaacaattccttatacattgcctcattttcctgctggcaaaatgcatctttacaaattttgcacctctcatagagtctccattcctctgttgtggggatggtaagggtcattatcatgtcttctttgacctaggtttagagtcatttccccttctcaagtaaaggagatttgtgcttgcaatttctggagcaattatcttcctaacagaggaccagacaatttggcaaatataaaaaatcatgttggacttgctgtcctccaatcacacatcttttagatttgaagtaaggcctctttctattattcctgtagctccaattatattgaaataatttttagacagtgaaccaattgcttgagttactactgagtgctctgcaccagtatcaaccataaagtccattttctggccccctacctccattgagaccataggctcctccgggcctaatgaaatggagcctggtctatctcagtcctcataataatcattgattcctgccagtccaattaaatccatgtctgacttctgaaccccttgaccagtggcggtgggttctggccagccgttttttccctgattgttgcctctttccttttctctttctgggcattcgttcttacagtgtcccatctgcgtgcatcttgaacattgatctctctcaagcttaggttggcacccttgtcctggcttagcttcttggttttgcctagcttgtcctctactctgaccatgaccatgtcttctcacaaaacccgtttcttgtccaactaaggctgtctccagccagtctgccttttccttagctctgcatttagctttgctcctggcctcctcatcctgatttacaaacaccttagtagccaccaggacaggataagctgggtaatattcatgccttcaaaacattctaacttctgaagtttaccctttatgtctccttgttcctggcttacaaatgccacattaaccatacactaattacccgcagcctctgggtcaaatggaccgtccaggtcatgagcctgtttggtttatcaggccatgagcctattttgtgtatccccagttgtgtcacttaagactgtgtccgtggtgtgagccaggttaagtaaacttagagacctgagagcccatcttgaagagctgaggaagcagccaagaaactttatcaattctgttggattatcagagcacctaatatggtcagagaattaaaatttgtaagagtcatgtaataatagtgctgcagatcctgtaatgccaggtacagtttctgcttcatagctgtctggaggcgcagttttcagaaaccatagacatctgagaaatatgtttctggcttttatgctcaagcaaatttattaaagaccacaaggccacagcaatattcaataaatcatgacatgctttatttcatgtcatatttcaaaagcttcatgtagcagtaaacaataccacttacatttaattagttttattgaacataaagcaacttcatttgtaatgaaccacatgttaggattaaggatgtattttaatgacctttaagtaatgcgaccaagttgttgccctcgacctcacagcagaggctttcctatattattgaaaacttcagaatgatttttaagttaccatgaaaagcttcaaatgacattctccttattgtgtctttattcagtcatctgatgttgactatactagatgaaatgcattcctgtaaatgctgatgtgtgtatagaaatgagcttcttgccaacctgttcttaattttaatgtatcaaaagtagtttgatgtatgaaaatttcatgttttgaaaattaccatgacaatgtaatatttacattctcaaactcaccctattcctggaatcatctgagtacatatcagacattctactagaagtttcataattatcaggttattagagaatatttctttttgtgtaaactagcttgtgttgaaaatgaatttcgctgttaatagttaatacacagtttgagctacagtaacacttgcagtgcggtaaattagtatggtcaaccattagtccaccctttctgaagctgctcttctttagaaaagctgaggcaggtggattgcttgaggtcaggatttccagaccagcctgggcaacatggtgaaaccccatttctactaaaagtacaaaaattagccaggcatggtgctacacccctgtaatcccagctactcaggaggccgaggcacaagaatcacttgaactccagaggagaaggttgcagtgactcgagatcccgctactgcactccagcctgggtgaagaatgagactccatctcaaaaaaaaaaaaaaaaaaacagaaagagagagagaaaaagctgacctgcggatatctttcacagtctctttaaagccatgtgaatttgctttaacattgaacgtactttcacagagcttgtaaggtggtagtgaggaggaagtatctttttgcttgtgtgttttctgtgggcaggtatgcttggggaggtctaagctcctgctgctgctctctagcttcagggcttggatgggaggcactgtgtgcatggtgttctccaaaccatgtgtgtcagatgtgatccttgtcctgggtcttctaaggaccaatattttggagagtaattttggatcttcagtcatgaactttatcttttcctctgattttagaaacatctcattctgtgtttgaagtcactttctgctacatggtctaagatggcatctgtttcctgtactgaaatgtgactgatacaccttaaattgaaagagtttttcaccctcaccaatagaccaggttggtggtacaagggcagctttgtcatccctcatatgtaagtttgcaggctgggtcccagtaactgccccacctccacagtggcccacaggggaggggaagcaagggcccagtaagtaattggacccaaaggaacacatgtcccttcttatcttctgctggccataatcagtcacctgatcctaaacagctgcaaagaaggtttaggagttcattctttaggtgggaagccacccacccatctaaagctccaaatttgtatttttcataggaaatgagaagaaacgtggatggtctctgctgagccattgcttcattttcgttgagtgtctgattcacccgtgcttctgctgagtggagtgcactaaaccatttggggagttctcagaggattgtgctgccctgagaacaggatgccccttagaattgctgttaaaattactagttttattagcatcaattattattactattttttcagatggagtctcactctgtcactaggctggagtgcagtggcatgatcttaactcactgcaacctccacttcccaggttcaatgattctcctgcctcagcctcccaaatagctgggactacaggcgtgcaccaccatgcccagttaatttttgtatttttagtagggacagggtttcaccatgttggccaggatggtcttgatctcttcacctggtgatatgccggcctcagcctcccaaagtgctgggattacaggcataagctaccatgccctgacttgcatcaattatttcacatgcattcttgaacgagctctaagcagtttacaaacctttatgttaatgactcacatacattaaaatagaaaataaatgaaatatcaacagaaaaatagtatgtcttctagaaatgaaagaagacttatcagttttagatgactgactcttctgtttacagatttttaaaaaatattttaagttctggggtagatgtgcagaacgtgcatgtttgttacataggtattcatgtgccgtggtggtttgctgcactcatcaacccgtcatctacattaggtatttttcctaatgctatccctcccctacccccgcacccccaaacagtgcctggtgtgtgatgttctcctccgtgtgtctatgtgttctcattgttcaactcccacttatgagtgagaacatgaggtgtttggttttccgttcttgccttagtttgctgagaatgatggtttccagtgtcgtctatgtccctgcaaaggacatgaactcatcctttttttatggctgcatagaattctgtgttgcgggtgggggcttcagggccgcggagggggtccccttagggtgggccgtctcctcctcgcccgccgcaggcaggagcgcgggggaccgaaaccgtgtagtttgcagcgtcaggcagcgggtccgcgcccagcgagcggctccccagctcctgggaggatgcggacccgggacgcccccgtgagctcactgcgcctggctgacacgaggcgctcacagaacaaagcaagggcttcggggagggcgcggccgcggggccgagcgcgcagatcgctccggaccgggacaccgcctgcgaggagcgccgaccagccgggaagggttcgcgctaggcggcgcccgggtcccgtcggccagggtctcgccggctcgccgcgctccccaccttgcctgcgcccgcccggagccagcggttctccaagcacccagcatcctgctagacgcgccgcgcaccgacgtaggggacatgggcagagcaatggtggccaggcttgggctggggctgctgctgctggcactgctcctacccacgcagatttattccagtgaaacaacaactggaacttcaagtaactcctcccagagtacttccaacactgggttggccccaaatccaactaatgccaccaccaaggcggctggtggtgccctgcagtcaacagccagtctcttcgtggtctcactctctcttctgcatctctactcttaagagactcaggccaagaaacgtcttctaaacttccccatcttctaaacccaatccaaatggcgtctggaagtccaatgtggcaaggaaaaacaggtcttcatcgaatctactaattccacaccttttattgacacagaaaatgttgagaatcccaaatttgattgatttgaagaacatgtgagaggtttgactagatgatggatgccaatattaaatctgctggagtttcatgtacaagatgaaggagaggcaacatccaaaatagttaagacatgatttccttgaatgtggcttgagaaatatggacacttaatactaccttgaaaataagaatagaaataaaggatgtgattgtggaatggagattcagttttcatttggttcattaattctataaggccataaaacaggtaatataaaaagcttccatgattctatttatatgtacatgagaaggaacttccaggtgttactgtaattcctcaacgtattgtttcggcagcacttatttaatgccgatatactctagatgaagttttacattgttgagctattgctgttctcttgggaactgaactcactttcctcctgaggctttggatttgacattgcgtttgaccttttatgtagtaattgacatgtgccagggcaatgatgaatgagaatctacccccagatccaagcagcctgagcaactcttgattatccatattgagtcaaatggtaggcatttcctatcacctatttccattcaaca

SEQ ID NO: 192 - DNA, 6000 bp, Homo sapiens
agggagatcgagaccatcctggctaacagggtgaaaccccatctctactaaaaatacaaaaaattagctgggcatggtggtgggcacctgtagtcccagcaacttgggaggctgaggcaggagaatgctgtgaacccgggaggcggagcttgcagtgagccgagattgagccactgcactccagcctgggtgacagagcaagactccatctcaaaaataaataaataaataaataaaaattaaaagttagcccagtgtggtggcacacatctgtggtcccaggtacttgggaggatgagatgggaggatcccttgagcccaggaggtttagactatagtgagccatgatcatgccactgcactccagcccgggtgacaaagtgagaccctgtctcaaaataataacaataaaacaaaacaaagaaggctttaaagtcttgcagacctgggttggaatcctggttatattacttgttcattctgactttatacaaattaatctctctaagctttaatttcagtgagatgggaagcataacgtcacctacctcatagggttgctgtgagtattgagtgggtattgagtgagctattgcttgtatagcccttggccctgtgactagtacgtagtaaataaataaataaataaataggtgggccagagccccagaccagaaaactgattattacagtccacagtggtaattgctgtggtgggagatactggatcccgtaggagtccagagtaagtacatcaaggaagggttcttggaggaattgacatctaagttggcctgctgaaaggacgtgggagagcattacagacggaggggagaacagtgaaggggctcaatcacagtggggacagagaggcaagagatcagcctgtgaatggcaggagcagcaagaccatgcagggctagacatccatgaaaacaagtttggcttttattcagagagcaatgcggggggcactgaagagttctaagtagaggagcaacagaacagatatgcaagattaggggcagggagaccagcgaggaagtgagaggtggcagtggtctggactggggttggcctgcagatggagaaggtggtctcactggtgagactagtgacaagacttgtttgaggggaggttggtagaagaagggaggagaggatgactccgagggggtgcatggtaatgccttccatcaagacagggacagaaaacaatctggtgcaaggagtgggcgtacgagatggtgagttcagttttggacctgtagagtttaaggtgtctgtctgtgagccagtgaaatgaaactgtctcataggtggctggatacatagatcttgaactagagaagagtccaggctggaaatacagccttggaagatgtgattggctcagtaatggctcccaaagatatccaggtcctaatccatggaacctgtaaatggcacttatatagcaaaagagattttgcaggtgtgattaaattaaggattttgagatggggagattatcctggattatctggataggccctaaatgtaatcacaaatgtccttataagagggaggctgagcactttgagaggtccaggtgggtggaccacttgaggtcaggagttggagaccagtctggccaacatgatgaaaccctgtctgtactaaaaatacaaaaaataaaaatataagtaaataaaaaataaaaataaaaaattagctgggtgtggtggcatgggcctgtaattctagctactcaggaggctgaggcacaaaaatcccttgaacctgtgaagcagaggttgcagtgagctgagatcacaccactgcactccagcctgggcgacagagaggcatcacgtctcaaaaaaaaaaaaaaaaaaaagagagaggttgaactagctgggcgtggtgtcatgcacctgcagtcccagctacttgggaggctgaggtgggaggatcgcaaaagcccaggaggttgagacttcagggagctgtgatcactccactgcttggagtgacagaatgagaccctgcctcaaaaaaaaaaaaaaaaaaaaaaaaaaagagggggccgggcgccgtggctcatgcctgtaatcccagaactttcggaggccgacgcgggtggatctcctaaggtcaggagttcgaggaccaacattgagaaaccccatctctactaaacatacaaaattagccgggcatagtggcgcatgcctgtaatcccagctactctggaggctgaggcaggagaatcgctggaacccgggaggcggaggttgtggtgagctgagatcgcaccattgcacttcagcctgggcaacaagagtgaaactccgtctcaaaaaaaacaaaaaaaaaacaaaaagaagaggggtggggaggctgggagaaatttgatcacagggaagaaggcaagtaagatgcttgaagatgctgctgcccttgaaggtggaaggtgccataagccaaagaatgcaaaaactacagctctcgaagctgcaaaagcaagaaaacagatgctcccttatagcatccagaggaagtacagccccactgataccttgattttagcccagtgaaagttattgcagacttgtgacctccagacatgtaaaagaataaatgtggccaggcgcagtggctcatgcctgtaatcccagcactctgggaggccgaggtgggcggatcacctgaggtcagaagttcaagaccagcctggccaacacggcgaaaccccgtctctactaaaaaatacaaaaattagctgggtgtggtggcacgtgcctgtaatcccagctactcgggaggctgagggaagttattggtgatttgttatagtagcaacaggaaactagtacagaagacatcaacattaccgttgggattggatgaagaaatccaggaaggctgatagagtgagacatgcagaggatttagcagagagctcccaacaactccagcatttaagatccctgcggaggaagtgcatctcagaaagggctcttggaacagccagagggagagggccaccaaagaaaatagttctcctaggattcaggggcaagggtgtttcaaggagaagggagtggttaacattgtcagatgctcctaaaagtcaagcaagaaaagtgcctaagctcaggagtttgaggctgccttgagctatgatcattgcactgcacttcagcctgggcgacagagtgagaccttgtctctaaaaataaataacaagaaaagtgcctatttggtttcaacaggagaagttgaccttgaaagaactcttggaatagttgtcgtctctatcagatggtacacatttttttcaacttttaattcttttttctttcttttctttttctttttctttttttttttttttgagacagggtctcactttgtcacccaggctggagtgcaatggcaggatctcagctcactgcaaacttgacctcccaggtttaagccattttcctgcctcagcccaccaagtagctgggactacaggcaagagccaccacgccgggctaatttttgtatattttgtagagacaaggtttcgccatgttgctcaggttggccttgaactcctgaacaatccgctcacctcggcttcccaaagtgctaagattacaggcatgagccatcgctcccgtcaacttttaattctattacacagtagtatatggtcattgtataaaagttaggatatacagattcaccaaaagaaaagaaagttactcataatgtcttcagctagtgcatatctgtcttcagctagtgcataaaatgttgctggtgcaacattttagtgcatatctttccggattttttcttttcttttcttttctgtgcgagaaaagaaaagattctctcaatcgccgccctgtggggtaaaataccatgaggccattttaagagggggaaatgcaggcttagagaagcaagcaatttatccaaagtaaccaagattggaatctaggttcctctgactccaaaaccaatgttccttgctgcggtgctttcctagctttttacttggagaacttttccccagaggacctcaggcttcagaactaaacctaagtggatttctatcctgaaccccatccctcatccgccccaaaggatggtgagccagattaaggggtgaaaggcaggagcaggaagagtaaaggcgtgggtgcgatctatggtcgggtaagagggaactagtacacgcacgtgttcggttcttcgcaacatcacaatcaagcgggcatcaggcttcccattgtacagataaggaaactgaggttccagaagagaagtaattttccccaagtcacacagctagccaggggccccgatccacacatccccggggcggcgggggttatcaggagggagtctccggatgcctgcaaagctgaggctgagagctgggcgtacgcagcaaaggaggggtggggcgattcggggcggagcgaggcaaggagattgggcgggactggggagagaggagggaagggtggcgggggggtggtagggcagaaggggcgaggtcatggggaactcggaacgaatcagcagaggagggaggaagagggagggggctctaagactcgacgcggagatggaacagcctgggccgtgcaagggaggaggatttggaagacccagagcgggatgaaacgggacagagccctgaaggggcagggatgggggaaggcggaggagtttctactgaggccaggggtggggcatcgcgccagggggcggggtctgaggcggtgaggggctgggggcgtggcctagggggccggcgaggggccggggaagcggcctgacgcggtgcggggccgggaccggggccggagcctggaccttggcggtggaggaaggcgaggagccgggggcggggccgtcccagctgaggagcggagagcggctggagggtcgggggcggggcgtgcggaggggcggggcgtgtggaggccgggacggcgcccccggccggcggtgaggccggctcagcgcggagcagctcagtgccccccgcgccccgctccggcagctccacgctcgcgcccgccatgccggagcagttcagcgtcgccgagttcctggccgtcaccgcggaggacctcagctccccggctggggccgccgccttcgccgccaagatgccccggtaccgaggggcggcgctggcgcgggaggaggtgagggggccgaggcgggaggggtcgggggtcggcgccgggcctggccttgacctccacaggcgtgtcgcacccgagctgcgatggcccttcaccgcgccccgaaacctgccccctccctaggtctgggaggaccgagcgcatctccaacagctgcgtcctcaccgtcgaggcgggggaaggcccgagggaccgttttggggggcctcgaggtctcttcgatgacaaactccacaggtcgggggacgtaccccaagtgccccgcgtgaccgcctcatcacatatgtgtttgcctagcgccttccagcctcagtttgcgttttcatcttcggagccccacaagtgtgccccccgagtcactccccttctgagaggcaggcttcccgcctcagtcctgaactttcttccccccggctgcagagaggccccctcccgcttgcggctggttcggagatttggcccgcgtttgtggaatgaatgcggatgggaaggcgccaggagccggggttcaccttggccgggctgttggcaagtttatcgtctcctctcccctcccctctcctctttgtctttcccagcaaagcgtcccaggccttttctttcggtcttgcaggctgccccaccccattcccatgctcttcggagttccttccattcctcttctctgaacctgctgcagctttccgcagctcctctgcaaagaatattctaggacagacaccccgtggccttggtccaacggagaataatgtgtttttgcagctccccatccaaaggatgccctcaatttgggtggcat

SEQ ID NO: 193 - DNA, 6000 bp, Homo sapiens
ggaacacaagtcagcagcgaaaaggaaggaactactgaccccagccgcaccctggatgcatccccagagagttatgatgagcaagaaaagccaatcccaaagggctccctgttgtatgattcagttgacatgacattctggaaatgtcaggtttatggaaatggagaaggagtccccggtggctggggttacagagcgagtggtgagggaggaggcgatgaagatgctgggtacttaccgcatcttccctccctgactaggtatcaccatgccctgagtacagaatgtgacaccacaggatgctcccggactgtcctcatcagctggagcccccgggggacagcatgtcttcctgtcagttgcatctagaagtgccatgcccaccctctctatcgaatacacgtttcatccatatttgtgtgtgtggatcagtgaagaagaaacttaagtagtggaacttaatacatatgtggaaaacatattctacataacttcactcaaccaggcagtagggatagcacatggggccatctgtatataggtcatagttcaaagcattgaatcatgacagaggaatagagactgaccactgagtcttctgagcagaggtttaagattagagagaaaaaggctacccagaaggaactcaaattcatgggacaaaatgttagaatatccatgtaggaagatgcaaagaaagataaaaggaaagatgccagggaggccacaaggacaaacaactgcatgtaaccaagggcacatggccgggtcacctcgctaaagggtcctgatgatcatgtttctaaatagaagaaccttacattgcttttcagacatttccaagggaatgatatcagaagcacaagagtcttggttaggtgaccatggacccctacagcaagagtgctggccccagtcgagcacttacctcactgattatgactctccatggctccatgtccccatagattgtaggtgctaggacaacccctgatgcattctaggtaactgtttactaaatagcacattttataaatgtgtgcatcaacgtcacttcagtgttcactactaaatgaccacctagttccttagctactcaaggcaaaaaaaaaattattattgtttttcacacagtaaattttttattggaggaggagaacatctaaaatctacattcttagaaaaattttagtatgcaatacaatattatgaatattataatccttgtgctgcacattacatttctaggcttattcaattgatcatagttgacatgactacaaccataaagactgttgagattacaatgctctttaaaaataaccctcttcaagaaaaaaattgaaatgacacccacaaaaaagctgattgcgtttttataataaacaactatgaaagaaagaaaatatgttttgagaagaatttaaagtactgaacttaggttaaattatttagtaccaaaaaagtattaaagtgtaatttaactcatttgtagtttaaagtcagcagaatatacatacttttaattgtcatcctactaagaagatacatatactgaaatcaacaaggctttaagtttttcaatttttaaagatgcatattttaacgttactgagacactttccaacacatcttctaagcaaggcaccagactccaaattgttttttcatgtaaaaaatattcactgggccgggtgcatgactcacgcctgtaatcccagcactttgggaggccaaagcagacggatcacctaaggtcaggagtctgagaccagcctagccaatatggcaaaaccccgtctctactaaaaatacaaaaaattagccaggcgtggtggcgagcactcgtaatcccaactacttgggaggctgaggcaggagaattgtttgaaccggggaggcggaggttgcagtgagccaaaatcacaccattgtactccagcctgggcaacagagactctgtttcaaaaagaaaaaaaaaatcatgttcctggtctcttcattcattttactggtctctataacagacttaaaagaaaggttatagactgtaattcatgctttatgttattatctacctcctacttattctttacctgaaggtgaaaggtctaactgtgatttggaattgtcatcaacccacagtattctaagcatatattattttcattgccaaatttcatcttccctgcttgaaggattactagcaaaatgaggtggtgacaagatcaacatgtgagaagtcaaaagaaggcaatctgaggctactggccccctggccatgttatacctaagaaattcgtcacttgagcatccctgggtaggaggctactttgtgttgttgagatcacatcctggctgagatggagtgagttaaatcacaaaagctaagagtaacgagtgttggtcaaacaaatagacccaatcctgatatccctgaaaatttcagatggagaagcattttcaaagaaaacaattgttttacaacgatctgacaatgaatttttcttgccggtacattttatttgaaaaacgataaagataaaaataattacatttatctgccttttacactcatctgacctaaaataaaatttcaaatcccctagaacctggaggctatcacatggcatatcctgatcattcaacctggagttgacacactttctccggtgtcactaccatccatgtacatacatggctagtgatgcatcttcatcagatgcctctgattaaatctatcatgctcagttattcctcccaggaagaatcaagccatgggaaaataggactaaggttgaggatgagaaaaaggtgaagtatagaaagtactggaagactggggacatgaaatgggctggggagacaaggaatttaatgggagatcctgaacacagaggagcagaaaaggggcaaaagcttacaatgaactaccagaaattggaggggaaataaagatgtcaaagataaaagccagtttcacctaatacacaactctgtctccagcaggatctattcctctaggcttagtgggtggtaactactggaaggtcggcagaggtgcaggaactaagaaataaaccaagactacaaaattaccactgtgcctacttcaatacacctttcttcccccactccaggtaacactcacatagaaggcacagcacaaaatgaatgcccactggttggttagtagaaagttgtaaagtaggcagagaatagcaaaggcaccatcatactgttaccaagcaaaggaggctcgctgcccgaggcactagaagtcaatactataacactgggtttttgataaaataaaaacttttattgcatgtcaaccaacaaagaaataggaagtccagctcaaatctgtctccctgtgctggctttaggacaattattttattagaaatggttttgagtgtggattctgggattagcaggtgcttggtggaaggaaagaggaagtctggaaagtccttgcgcatgtgctcttatttcttcatgctacctaagggttccacgtgcaaattcagtgaggagttagtatgaaacatggcagtagaaattcagctgtaaggtcagcaagctggatctgtgcagactctagttggccttatatgttccagtggatttcagccagttttattaacctacaagcccaggcatttcagcatttcagcaatttgtttcttttatctgccatcctgtaaactcaagaatttctatgactgttttctttaactctttggcacacagtttcaacgcccttcttctcagaggtggtcattctcaccctcaccttctggttcctgcaggctcatttctagcctcccacactgtattagtcttttctcacaatgctgtaaagaactgcccaagactgggtaatttataaacgaaggaggtttagttgactcacaatctcacatggctgcggaggcctcaggaaacttacaatcatggcagaaggccacggagaagcagttaccttctccacaagggggcaggaaggaaaagtgctgggagaagggagaagagcctcttataaaaccatcagatctcgtgagaattcactcgctattacgagaacagcatgggggaaactgcccccatgatccaattacttccacctggtctctcctttgacaagcggggattatgggtattacaattcaagatgagatttgagtggggacacaaagcctaaccatatcacacatatacacacaacctaacctcctcacatcccattccttgatggggtggcaggtggcgaggggggggtgacatcccttattgtcagccatcacaggaactcatgaccctgtaggtgcagattcatggctcacatttgtatcttttggggaaaactgaggtaatcaaggtggggctaggccctggggacgaggcaagtaaaggactttgccatgtccgcacccaccagggaaggagcagagactctgttagggcgccatgccaggggctgcagtttcagaatcctgcagactccaccctctatctggccacactgtccccaatttttgcgaggtgacctggggagggaggacaggtcggatgctccgacctcaccagggactccactggaccggagctcttcctcctccgcccagtccacatgagagagctccctggccggccctgagacagctccagacctggtagccctggaaaaagaaactggtatcgccatcgccgccgccgctagagggcgcctgggggcggggcgcgggtggggcaaggcggggtccgactggaggcagggcggtgagccgagaggggcggggcaagggaccgggaggcggggccaggggtcgcaaggcggaagagcccctctcgcctccgacccggcgcctcgcactccgttcactctcggttcctcttcgcattcttgccagtcccgtagcgctgggctggtttcctccgaggtctctaagagcctcctactgcgccccgctcgccgcccggaagcccccagcccctcaaggacgcatcacctaatgccgcggtcacggccaccgtcacaagcgcccccagccccaccccaccccggcctgcccgccgtccttctcccgcccccgcccctgcctgccagctccaccgggccgtaggtgcggacgacctcaaaattcctcggcccgcgaaggccgccagctgcggggaggggaggggaggcgcggtcccgcagcgcccccaggctcatgtcccaggtatgtccagacccccgaggcaccgcttgcagggcagtgacagcccgtgaggctcggcctcgacccctggcacccttggtcccagctacgccggctcctggccttcccccaagtccgagagagaggtgggattctccccgacgcagttggaaaccgggaatcccctttagggtcccgttcgtgctgcactactgactccaccatctgcaaagggattcttgtccagaatccccgaaggctttaggacagcgcttattttgttgaatgaagagtctctaattttcggaaagaccacaggctaaaagtcaagtgagttttcttgaatagttatagttaaatttaaggcaggaattgaatgtcagttgatggccacaaagtagcggactggtacgaacctactggatgatcattctggtgactacttggaggcaccgtccactttgtggatttgtttcagttgaaatttatttccatagaacttatttaggtctctatttattactgatttgacggctttcagtgcagagggaagcctgtgacgtctgtgcagcgtcaggttgaacaatttagcagtgtaaaatgtgttttctgcctgccttgactcgacaagccaaatgtgccctccttttcttttccaggttgtgcctttttagccaagaagcatggaagtcattcacggcaggccctactgttgcagggagcttgaaggagctgacatactgtccaacaccttttactctaatgaattgcacaaccccctccagacggttac

SEQ ID NO: 194 - DNA, 6000 bp, Homo sapiens
ctcccaagtagctgagattacaggcatgcaccactacacctggctaattttgtatttttagtagagatggggtttctccatgttggtcaggctggtctagaactcccaacttcagatgatccgcccgcctcggcctcaaagtgttggattataggctgagccactgcccccagccagatgtcttcctgttaaaatggggctttaaattcctcacctaacatcattgtttgcaacaacagcaacaaagagcttccatagacagagtcagtgtcccagaacggggactaaacaaccaaacatctagaatctcaccagtcagtgaccctgaaggagacctcagtcacaacctttgttggagagcaagtggaactagggttttttaaagcctgaaagcacatcagttgtgccctaacaatgaaaggtttcagagtagttgaaagctaggaatttgaatatcttagaggaagttaagtggcttgaggtgcttccaccgaaggtctcagcaccatgagaatgcctgtgcttctgccggccccattcctgccagtgagcccacagacaaggggcgatgaagaaccaggaaacagatggaaagaaacgtggaagagaggaaagcctcagactgtcagggtgaaatctaggttgagagttaagttttagttcattctttggagagactgagccacaaggagccataattacaatagcgtttcagcacatccaggtgatcttggtctgcagtatttggttgaggactgtgtgaaagcagctgaggccaaatgtggtggctcacacctgtaatctcagcattttgggaggctgacttgggtggatcacttgaggccaggagtttgagaccagcctggctaatatggtgaaaccctgtctccactaaaaatacaaacattaaccaggcatggtagtgcatgcctgtaatcccagctacttgggaagcttgaggcaggagaatcgcttgaacccaggaggcagaggttgcagtgaactgagatggtaccactgcactgcagcttgggcaacagagagagactccgtctcaaaaaaaaaaaaaaaaaaaaaaaaagcagctaaggaaggctactatggtcacaaaagacttcccagaagatgggacttgggctggatcttgatagggaagatttccataaggagagagggcaggacatgggtggaacaggtgcaccaacagtagggcaccagggatgagagagctgctggttaggattatggtgagcaccacagaccacagacaaaccagaataaacgaacctgtggaccagcgtgtcctgcactgagacacacaccacgcacaccaacagggacgaagcacgttgcccacattgtatcgatgtatgcgaatgtggataagtcagctcattttctccttcccctccccacaaccaagtttactgctgctcctggctcccccatcctggggaatagcacatggtaagaacctcagcacccactccactcctctcgccctcatctccacacagctacctgtcaattccaccttcacactctttctgccaactgagccctcctcatctctctgcctctggcctgcctccccactacaactgagtttccatgcagttctcagaggaatccctcgaaggcacatgtgcaacctcatcacttccaggctgaaagatcttggttaagagaaatattagtacaagctattaagacttaggaggctgccgggcatggtggcacatgcctgtagtctcagcattttgggaggccaaggtgggctgactgcttgagcccaggagttcaagaccagcatgggcaacataaagagaccctatctctacaaaaaaaaaaaaaaaaaattagctggtgccttagtccgttttcatgctgctgataaagacatacctgagactgggcaatttacaaaagaggtttaggccaggtgcggtggctcatgcctgtaatcccagcactttgggaggccaaggcaggtggatcacctgaggtcaggagttcgagactagcctggccaacatgttgaaaccccatctctactaaaaaatacaaaaattagccagtcgtggtggcacgtctgtaatcctagctacttggaaggctgaggaaggagaatcgcttgaatctgggaggcggagtttgcagtgagccaagatagcaccactgcactgcagcctgagtgacagagctagactgtgtctcaaaaaaaaaaaaaaagaaaagaagtttaatggacttatagttccacatagctggggaggcctcacaatcacggcagaaggcaaggaggagcaagtcacgtcttacataaatggccgcaggcagaaaaagagcttgtgcagggaaactcccgtttttaaaaccatcagatctcgtgagactcattcactatcaaaagaacagtgcagtaaagacctgcccccataattcagtcacctcccaccaggttcttcccataacatgtgggaattgtgggagttacaattctagatgagatttgggtagggacgcagtgaaaccatatcagtcaggcatggtggcatgcacctgtaatcacaactactcaggaggctgaggtgggaggatcaattgagcctgggaggtcgaggctgcagcgagttgtgattgtgctactgcactccagcctgggtgacagcgagaccctggtcttggggaaaaaaaacaagaagacttagaaagctacagtgatgaaaacagtgtcatactggcacacgcatacagagatcaatgacacagaatatacagtagttcagaaatagctacttacagttacttagtagtaaaaagatgactggcaggatgtatttgtgccatatatgatagacaaaatgttaattgcctggatacatataaagcacctacaaatcaatttcagaaagaccaacaatccaatagaaaagtgagccagagacatgagcagctagttcatagcagaggaaacatgcatgacttcatctaggcagagatgctcaagctcactcgtaaaagagaagcaaattaatgtggtagtgaaatgccactttttcgtctctcagattagcaaagctaaaaaaaaaatcctgaaacttctactggtgagggtgtaaggaaactcagacatgacaggtagtggggcataaattaaacttctttggagggtaatatatctgtatttaaattgtaaatattctttgttccatttctactaatttctttcttttcttttctttcttttttttttctttttttttttcttttttttttttttttgagacgtagtctcactctatcacccaggctggagttcagtggcacgatctcagctcttggctcactgcaacctctgtctcccagattcaagcaatctcctgcctcaccttctggagtagctgggattacaggcactgcgaccattcctggctaattgtgtgtgtgtgtgtgtgtgtgtgtgtgtgtgtgtgtgtgtgtgtgtgtgtgtgtttagtagagatggggtttcaccatgttggccaggctggtctcgaactcctcacctcaagtgatctacccgcctcagcttcccccccagagtgctgagattacaggcacgagtcatggtgccagcctcatttctattaatttcttaagcaaatcaagagcatacattgtggcattgtttgtagtggcaaaagattggaaacaacctaaatgtccatcataggaaattcatgaaataaaactacctcatgtatccagaggaataccatgaaactgttgaagagaatggggacatagtccttgtgtgctgtgacaaaacgatctccacacacagtattaagggaaaaaaagtacctggcacggtggctcatgcctgtaatcccagaactttgggaggccgaggtgggcggatcacctaaggtcaggagttcgagaccagcttgaccaatatgatgaaaccccatctctactaaaaatacaaaaattaaccaagtgtggtggcatgcgcctgtaatcccagccacttgggaggctgagacaggagaatcgctagaacctgggaggtggaagttgcagtgagcccacatggtgccagcctgggcaacaagagtgaaaccccatctaaaaaaaaaaagcaaggcgccattgggaaggggaagtggggcctgcatggctgaattcagagaaggaagggagtcttggttatcagattatctctgcagctgatctccaaacctatttcccttcttcctggcacaggggccactcatttcccagactcttttgcatggaggcatggttgtgtgattgaaatccagccaggcgagcaggctcagcccacagaaacctcccatgggccacccccatgccttttcttcctctggtttgtgtggaatggtgctgagcccccagggcgactttggtggaatctggtgttgaaatcagagtcccaccgccgggcgcggtggctcacgcctgtaatcccagcactttgggaggccgaggcaggcggatcatgaggtgaggagatcgagaccatcctggctaacacggtgaaaccccgtctctactgaaaatacaaaaaattagccgggcgtggtggcaggcgcctgtggtcccagctactccggaggcggaggcaggagactggtgtgaacccgggaggcagagcttgcagtgagccgagatcgtgccactgcactccagcctaggcgacacagtgagactccgtctcaaaaaaaaaaaaaaaaaaaagaataagcaaatcatgcaaatcatcctgttctaaactctgaaccgctgcttccaagaccgtccctgcccttgccctggccgcctctctccttgttaactgggctccattcattctttccatttctctaacacgtgccaggtggtctcatctcctggcctttgcccttgctgttccctgtcatcattcaggtctcacttgtcatttcctgaccatggtacttataaaagcagtgccgtctgccccatccatgtcacctcgttcatctccttcacctccgaaatgatctcgcttttgggtttacggccggtctcttcacctggagcatcagccgggaaggtcagggtcgccctggctcgggcctgttcacattggggtcaaaggcacacattgggggctcaaccaaggcgagctgcgttcgcggggccgggtctttccgcacaggcggagggcggtggcgggcgcggaggcgtcgcgcgagccagggggcagccacgggccgggggtacctagcgccacccgcttcgcttgcatcagctgcgcgccccatcccgaggaatggtagaggcagccccgcccccggcccgcccccgcctttccattggctgccgcgcggggcggggagcggggtcggctcagtggccctgagaccctagctctgctctcggtccgctcgctgtccgctagcccgctgcgatgttgcgcgctgccgcccgcttcgggccccgcctgggccgccgcctcttgtcagccgccgccacccaggccgtgcctgcccccaaccagcagcccgaggtcttctgcaaccaggtgagcccaccggccgggctcgcgctttgttttccggcccgagtcccccgcaggcccctaggaaggccccgcgccgccgtgggccttagtgtactcatctggggctcgaggggtttgcagaggctgacctggaagcacatctgccccctcctctcctgcaagcattttagccccttcgccgcctctgacagtccccgtcccatttccccgtgacttgggccccctctccgtcttcgcccagcctcggtctgttttccagggccaactctcggggttccgttctccccatggtccttgctttcgggtctccgcagggtccccaccctcacccactcagaagacgcgaccaagtccctctttgcaggaactttcctgtcttttccttagtcatcccctttaccccctgactcatgccctcatccaaggagttcaaaaggaaaaaccag

SEQ ID NO: 195 - DNA, 6000 bp, Homo sapiens
gaacagtgtttatatctgggggggaagtagagaattttgatacataggggagaggaggcttctggtagtgcactgttttgacctgagtgttaaacaggtgtttgctttagaactgttaaatcattcatgcatactatataaaattttcttcatatgtattatatttcgcgaacacaaaaaatactccacataaaaaaagcttttctctaacggtaaaatttacatcgctgcattttcttgactgatctcgtatattctcccacaaaatgttatcctaacaatatattttgtgtgaaagtaacttactgagcatcctatggtatttggatgatttttaactttttgcaaaaagtacttaacgtcacggcaacttaatttagtcgcctttacttctgctatctctcagtcaagaagtcctcataccagcccttgtgccgggggctgtagttaaaaattaaattagccttcaagcttaccatgtgtcaggcactgcccaaaacgctttacgtgcattatctcatttaatccccaggtaggtggttatgacccccattttagaggtgtagaatcttaagttaggagacattaattctcaaggttaaaggtcgtgaatggcaggtcgtagcctctaaatcagaaagttaggtgagactttttggtttccctcgccccctccgttccagtttctctggcttcttttctagggaaaaaaagctggtaaggaagcggcaaatgcgtgacacacaggcccgcgtgagtccgagtcgggggacttggtacgggctgccggtcacaccgccccagagaaaattgggcgcaaccttcttaacttaaataatgaccctttttgcttgttaacctccagtctaaacgcccattccatcccgcaccagtttccccttctgtgaaggcatgcatggagtatgtcgctctccactgacctgaagctgctctcactgcaccagcaaaggcagaggcagccatcttcaccttcgcctacggcggccgctttgggtttaaaagcacaagagcaaaagagaatgaagggaaagcaaggaggcggagtcaaggaagaggaaaagaacaaagttgtccactcaacatttattcaatgtcatctgccgggttccgttcttcgccgctgtaaaacgactgcctatagaaggttctacaaaatttcttattaaaaaaaattcttggggccgggcacggtggctcacgcctgtaatcccagcactttgggaggccgcggcgggcggatcacaaggtcaggagttcgagaccagcctggccaacatgatgaaacccccgtctgtactaaaaatacaaaaagtagccgggcttgggaggctgaggcaggagaatcgcttgaaaccggaaggcggaggttgcagtgagcagagatcgtgccactgaactccagtctgggcgaaagagcgaaactccatctcaaaaaaaaaaaaaaaattcttgccgggcgcggtggctcacgcctgtaatcccagcactttgggcggccgaggcgggcagatcacgaggtcaggagattgagaccatcctggctaacagggtgaaaccccgtctctactaaggggtacaaaaaattagccgggcgtggtggcgcgcgcctgtagttccagctattcgggaggctgaggcaggagaatcgcttgaacttgggaggcggttgttgcagcaagccaagattgagccaccgcactccagcctggggtacagagcaagatatagggtgtattaccttggaacactattgttgccaacttgatctcccacctatggtggccactttgagtccaaaaacaggcacatacgctagacaagtatattgaaacattcataaaagctctttgaattggcaacgggagtcattgcgcacttttttttttttttgagactaggtcttggtctgttgcgaaggcttgagtgcagtggtgcgatcacagctcactgcagcctcgacctcctaggctcaagcaatcctcccacctaagcctcctgagtagctgagactacaggcacacacctggctaatttttaaattttttgtagagacctaggtctcactatgttgcccagggtggtctcaattatttggtatggaatcaaacaggtctcccaccttggcctcccaaagtgctgggattacaggtgtgagccactgagcctggcctcactgcacatttttgaacaagtgagtgacttgatttaaattttgttttttagagacagggtctgagtgcagtggtgcaatcactgcagcctggaattcctgagctcaagggatcctcccaccacagccttccaagtagctggcaccacaggcatgcacaatcatcccctgctaatttaaaaaaattgtttatagagatgaggtttcacttttttttttttttttttttttttttttttttttggagacagactctcgctctgttgcccaggctggagtgcagtggtgcgatcttggctctctgcaagctccgcctcccgggttcacaccattctccgcctcagcctcccaagtagctgggactacaggtgcctgccaccacacccagctaattttttgtattattattattttttttagtagagacggggtttcaccgtgttagccaggatggtctcgatctcccgacctcatgatccgcccgcctcggcctcccaaagtgctgggagaggtctcactcttttgctcaggcaggtctcaaactcctgggctcaagtgatcctcccacctcagtctgccaaaatgccgggatatgagccaccacacccagcccctggtaacaaattttttttttttgagacggagtttcgctttgtcccccaggctggagtgcagtggtgtgatcttggctcactgcaacctctgcttcccaggttcaagtgattctccttcttcagcttcccacatagctgggattacaggcgcgcaccaccaagcctagctaatttttgtatttttagtagagacggggtttcaccatgttggccaggctggtctcgaattcctgacctcaggtgatccgcccgcgtcagcctcccaaagtgctgggattacaggtgtgagccacagcgcctggcctgcctgataacattttaaagcaaaaatattgacaacttccaagtggagagtgaggactctccacgtaggttatgaggggttgggaggctaattttgaggtttgagatcttgaagctagagaggttgctaatgatgttcaggcgcaagttgtggctgtgacgtacatgactgaagcaggatgaaaacattcactggcattgacaaattcaaagccaagggtgttagaaaagtcatcacacgggcaccacatgactgaagcaggatgaaagcgttcactggcattaagaagttcaaagacaagggtgttagaaaagtcatcacaccggcaccactgggcatgacagcagtgggcagggaggcagcaattcaattgctaaaattactaaagaaaacgggagactgctctggaagctaagtgaaagagatatgaaacatatgtaattactgtagtcccctaaaaaccatagaacatagaacatatacaaacataactattgctttcagataattttcaagtccatctctccatgctacaagtcatagcgcagtctacctctagagagaatacatattgtaataaattacccagttaagacttggaatactttgcaaatccaatagaagatagaaaagttagtttccacgatattgcaataagatgctaatagtattaatacgaacatattaattctggagtatacatggagtattaataccatgcttaatatttaacgtgttttattttgattacagaatcaatggaatacttttgttttttgagacagagtttcgctcttgttgcccaggctggagtgcaatggcgtgatctcggctcactgcaacctccgcctcccgggctcaagcaattctcctgcctcagcctcccgagtagctgggattacaggcacccgccaccatgcccagctaattttttgtatttttagtaaagacggggtttcactattttggccaggctggtctcgaattcctgacctcaggcgatccacccgccttggcctcccaaagtgctgggattacaggcgtgagtcatagctcctggccctacttttctttttaaattttttgtttgtttatttttctatatagagacgaggtctcactgtgttgcccagcctggtatcgaacctctgggctcaagcgatcctcccgcttcggcctcccgaagtactgggattacaagcgtgagccaccgcgccctgcccagtggaatactttcaacggtgcttctgcattgacttcccatcttccaacccatccacaaactgcagccaaaatgatgttactacagtaacaacttggagaaagcagtgtggcttaatctggaaggagcagaagctgtggagtccaaaggacccgtgttcctatccttgttgtgccacttgacacgtttagcacaagggtccccacagtgttagttcaccgtctccagcaatcactatgactccctggagggctgtcaaacgaaacaaaggcgcaaactgagacaattccattgtttacgtaactttcgccaaatcggctccttcctacgaaatatccagctcatagagcaggctgagatgctttgttgctttaattctctttaagagtcacagctgtccattttccacgtgcggctgaagaatggatttcagagcgctctccctccggcagtgttcacctagtaaccccttccggataaggacctgcagcccgggcgcgacccggaaagggaatccgcccttttcgcctccttcgcgccaatcgcctggagttggcgtttccgcagccgggacacagcccaccctctaagagccgcggagtcggggacggtagaaggggccgcgcgtgcgcagtggcgtccgctgtgcttccggtgcgccgggcgcggacgcgggcacgcacacacgcaagcacgcctccacttaactcgcgccgccgcggcagctcgagtccaccagcagcgccgtccgcttgaccgagatgctgcgggcctgtcagttatcgggtgtgaccgccgccgcccaggtgagcactggggctcccggaggcgcgtgaggaggctgaactagaaccgtcagcgaaaaacgggggagccttggtcgctgcctagcctccaggacaaaggcgagcctcagggccaccctcgtcgggagaggcccgggcgggcagctaggcagccaccagggagttcgccggactgggatgacttgaggttattgcagcagcggggtggggtgtggagagtagcgggaggcgcggcttcgtgggcatgtagtccaatcagggccgcgctgcccccgtccaggaccaatcctggctgctggcgtctgggtcgccggttgggcgcgcgataggttttcagtgctgaaggtcgacgggcgagaactacagttcccgtcaggacgagcggagcggcggcttgttgcatccttaataaggaggtgcctggacttctagcgagagtccacattttaggggtcaaggttgtaattatctgggagggagtgcctttcttttcgcagctgagaacacttctgagttattcttaatccaaacaaaagcgaaagattttcatttgtggagctgaaactcctggtcttcaaggaaagacaggagtcatgaccttgtggctcatttctgagattagggcagggatctgtgtctccaggcgctgggactactttgacattcaaggagcctaaatacccagttacttctagttttgcgtaattgccaaagttactttctaaaattgaaaattaaaaagcctgtttccactgctcatgattttcaggaagttgatattttggcaaaatgtagatagcaaaccaagtactgtgactcaagcagtaattgaacagaatccctaggaatagtgagttagagat

SEQ ID NO: 196 - DNA, 6000 bp, Homo sapiens
taaataaggtttgttttagaagaatctgattcaaagttttatagaatcctatttttaggtccttggtactgtagggagcaaaaaggggtgattcctttccttcctatcataacagttgacacctctctaacaaaggcaaattaacaagagaaaagcataacaaatttatttgatcgtagttttgtgtgacacaggagccttcagaatgaagaccccaagatataggggcaactattcctttattattatttttatttttgatttagggtctcactctgtagatcaggctggagtgcaatgtcctgatcatagctcactgtaacctgtaacttctgggcccaagtgatgttgcacctcggcctcccagaatgctggggttataggtatgagccaccttctcttggcccatttttatgcttgggttcaatgaagtatggaaagctgtgtagaaatatgattggacaaaaggggtatgatccagcaaggggaatggggaaatccagcaaggcctgtctgttcagatttcttcttggcctttcgatataacattccttcctcccaggtatggggtaggaccccctggaatgagggtcttaatttctttatggccagcagttagcaagaaagagaaagggaagggagggagaagattagagtaaaatgtttaggctctaaggctggttttggggaaaaggttctggtttatatgacccacctcagggaagaaggattccagtttctatggcttgcttcaagggagaataagagagtgagagacaggagggcaggagaaagctagacagagactttgcttctgaggctgctttttattccttcattttggggtatcatttttagccccaatagaccaccatctcctctggtacaaattcaactgccattttgggatcaagtccacatttgacattacctctcaggcaactttctgggcaaaagaattttctagggaaggttttatttttccctgtctagcatttttaatggcacagagtcaaggatttcaaaactgttgctaaaggtagcatttatcttgcaggtattaattcagaaagtgctaatggttgcaacagtctaaacaactgaaacttaaaacaacaacgttttcttttagctcagcctcttcccacaaagctcagaaatggtatggggagcagatgtgcacagggtggatagagaatgcagcgtaaaatcctgctggtggttttggtttagaatgtagattttacttgcactcttaccaggtaggatcaactgaaatcaaatgcaaaacaaaacaagaatagcaggttgatctgaaagaacaatcccagcattgacatcatcaaggtttaagcagatacatatacataatacataaatttagtatgaattatttatgagctaaagggttcaggttttagagcctgtagtataataagagttatactgaaagtcagaaccaatacaagaaactgaaacacttaaaaactcattatttcaatatttaatatcaggtcctgtgcagggtattgataatggacataaaagtgaatcaagatacagccctgccctggagaggctcccagactctgtagtgaagaggcatgtaaagagacaaatgagagcatgccatggtaagtgctgtggtcacacaaggaaggaagagttatacttgcctagaacctgtggaggcttcatagagaaggtgacttttaaattatgccttcaggccaggcgtggtggctcatgcctataatcccagcactttgggaggccaaggcgggtggatcacctgaggtcaggagtttgagaccagcctggccaacatggtgaaaacccatctctactaaaaaaaataaataaatacaaaaattagctgggcgtggtggcgggcacctgtaatcccagctagtcaggaggatgaggcaaggagaattgcttgaacctggaaggcggaagttgcagtcagcgagatcacacagcatgagactctgtctcagaaaaaattaattaattacgccttcaaggaacaactcagcccagcctgagttttcttacagctaacaacaaaacaacaatgtgacacaattgctgttaccatacaacccactagaggggttacagatattctaagtctcaccacaaccctaaaaggtagttatattccaatagactgatgaggaaactgaagttcatagctagagatacaagatttaagcccagacctatttcattccaaatcccttaccatagccctgcatagcccagaaatatctacttctgcttctatcaccaacctgtacatggttaacttgtaattacacagtctttagtgtgagaactactaactctggaagtccaattagaatgtcaaaatttagcctaaagaattgggtataaagtgaaaggtcaagacagagtctgtgcacccagttcatctagctcacagtaccctctccttcctggagatgtgctgaacttcaagcacatttgcttcaaaatggtttattctggtttgtgtgtatgcatgattcccatgaactatgaacaccctgaagtcggagaataagccttgtacttctttaagaccctcactcaagttgactgattgctaattctaccagtcctttacagagagcttgctaagtgtggatgttaatgtgaattaggtggactgaggtaagatcactagatttaaggtttacatgctacaaaataagaagaggtgaactaaccagtgtagcatagtttttagactagtggctttcaagcattaatgtgcatgtgaatcacctgcctacacgtgaagaactacccagttgatccaattagaaggcagacacaagagtagccaaaagtattgcaataaagcaacttggggtggactcaacttgcaggggattcagatcccaggtttccaaacctttttgctattcctggttcttttgctttcagtgaagagtagttaagtacaatagtagctctcatttactgactacttacaaagtgattggcactgttcttggtgctttgagcatattagctaattctcacagcaccctgtagtactatacctatagggatgataaggggatgtgggtggtggggagggggcagataaaaagaacagtaaatttcctaagtttaaactggaagaatagggatttcatcctggttcacctgagtacaaagtctaaggttcaatgattccttgacactgggtagcaagggagcatttcagggatgcctaagcttgtggtcaggtgccaacggtacaaagatagaagtatatcagagagcccttgcagaataaggccctccacaggagggttgtgaccttggtacttgcctcactgtgtttaaattcaggtaaggtaagagaattgaagaggtaaagctaccttagagagtattgctgcatctaccctggtgacttacaaggtacttgaatttttttttttctagcaaactgctaaagttagcctttgcctttttcccagagactctctaggaatttttcccatctgctgactaggaggtaagcccggacctaaatttttgtcttgttgtaggttaattaagactggtgttagattcagctcctaaggcctaagagaatttaaggttgtcttctgggaaggacacccaacagcagcattggaattggaaaaaaagtgtaggattttgctgagtgagcagggggaaagcaatgtaaagcccaagagaatatcttttgaacaaacgtccttttcattttggtttagaaatagaaacgtggtaaaaggaggcgactgttttctgaaggcttgtagcacgaaaacaggccaactggccagcaactagttgtctatcagtttctctactcacatacatctgccttttccagactgccagcgcggagcactagtttgactttgggtgctcttcaaatagctggcattgataaggcattcccagaagactgtgttacttagtaatcttgtcggtacattttttcactgggcagagattttccaaacagagagctgccagctttcaagacgtcagagtgctttttcatcctgaaattgggtgggaaaatggggagaagaaaagcacggttcagatcaatcaatgagagagaacccctccctccatactcgttaaacaacaggtggttttgctgtgcaccgtcaactcctttatgcgggagctgtaggcggggcattccaactgagtctccctggaatctgccccttagcccgtattgcaggggcggtgcagttggggattccggcctgaaaggagacttggttgtcaaggggctcaagggcttcatgatccaaggatattgggttttgcttttctccttctccatcttcctcattctatcccaccgtcccctccccacccttctcttaggaggccttcgcttctcctgtggaggggttatcttcatcctgaccctggccttcggaggagttcccagaagggctatttttagtggtggctgctcccctctaacttacccaggggaggagctgcggtggctgagccgacgctgcgcgcacagccgcctgtggttttccgcgcattgtgagggatgaggggtggaggtggtattagacgcagccgaatcctccctcagagtccgccaggtgggcgtctcaggggtgggagtggccgcgtcgtgaagcggagagaggatttctctcctggtcctggagaaggcccccggcggccggcggcatccctcgctggcgagtcccgggagcgaggtggtctctgcaggggaggaagttcccgggcggcgcggcctgcgtcacagcggggctggcaccgcggagtcgactcggcgggcggtggcgaccccggggccgggcgctgggcggcgctggctgccgctagccgggctgcgtgcggggcggcgctggaggcggctccgtccgcggccggggaggcggaggggaggagggcttgcggggctggggcgttagctgcgtcccggctggaagcccgcgaagagaagtaggaggaaggcgccgccgtggccgcggccgcagtgctcgggcgcgacaagccatgagcagcgaccccgcgggcgacgccgccgtccctggcagccgctgagcccgacccccaggcagctcgccgctccctagcaccttctccagtcgacactctcgcgcccggaggtaagggcgggggatccgcggagggatggagaggggcagcccgcagagggccacccgctcggtccgctgtgcgcgccggaccgggactcgccccgcctcactcgcgtccttgcttccccccggctctcagacaggcagaatgtggttgcccgcccggcgtgtggtgctgggaaccttccgctactgcggctcaggagcccgccaacccctaccccacccaatccgcgctagcccgagcggccgcgcgaggatctcagcctggcgcccaacgccgcgccgcagcggcaggtcctgcagactgggcgcgggggtgggggggcggtccgcgaggggaaatgcgtccgtggccggggcgatcgttgttctttcctacctcgaaaatctctgagaccccggggccagtcctttccggtctatcacccccctgccacctccgaacccttgaagttagcacttttgggcagggaaaggaattggaaggtttctcgaagaaacgtgagagcaccgtgtgctcacctgcaggacaggagggaaggggttcagcttgatcgggcgggccccagaagccaggtgtttaggccagcggttgaggccaaaaccgctgccttcatcccacgcctaggctcgctgatctttccctttccagctggttcccaccaatgagatgattagggatggagttagcaactcaggagccttagatgtgttctgtggacacgaatgcctttcttttctccctcagccggttcttccctccccaacccccacgcctgcccggtatacagcaaagtccaaacagtttcttccaaacctcgcatcctccgta

SEQ ID NO: 197 - DNA, 6000 bp, Homo sapiens
gttttcctgagacagggtctcgctctgtcacccaggctggagttcagaggcatgatcacagctcactgcagcctcgacctcccagggtcagcagtccttccacctcagcctcccaagtagctggtagtcacaggccaccatgcccggctaattttttaaaattttctgtagagaacgggtctcactatgttgccagggctggtctcaaactcctgggctcaagcaatcctcccaccttggcctcctagattgctgggtgtgagccaccgtgcccagcctatagtttaactttaaagcaaggatgattagtccctccccaaaactaacccccaaggagataagatgggtatacacataagtaacaatgttatgttaaaaatttgtaagagcactgtgacctgacaaagacaaagaagcttacccttgctgccacccagatgtctgtggtcactggtcaccttttgacctaagcctcttcccgttttccccctcccctaacataaaaggagcccaacattcacatttacttaagatgcttctttaggacagtagtctgccatcttggtttgctggctccacagaataaagtcatcttccctgctccaacgcctgtctcttgactgattggctgttgtgtggtgagcagtacaagctttggacgcagttacagcagtccatcaaaactgtagctccagcttcagaagagatgatattaaagttctctcatgatcttttatttccccaatttctgataagtgcattttcatatttatatggttttgcttcatttattcctattttgttttgtaattccttttttgttgtgtagatattatacatttatttatcttttatatatattttcaacaaatatataaaatatataaatacacaaatatataaaaaatattttatatatacttgttttatatatttcaatatataaaaatatatatttaaaaatatatatttgttttaaaatatatatatttgttttattttctatcacccatctttttcttagccagggaaaggcctctctttttcctcttttcctgtatatccttctactgattttattttgtttggggtgatttcacaatttggtggttgattttattgtcagtgttttttagaaaacttttaaaaatatgttttggaaacttggtttgcagatttatttttagtggaaagtttctttccttccccttttcctcactttttttctctcttcccattcttctccatgtgtagtcatttaccttttttatttatttttttttttgagacaaagtctcgctctgtcatctaggctgcagtgcagtggcgtgatttcagctcactgcaacctccgcctcccgggttccagtgattctcctgcctcggcctcccgagtagctgggactacaagtatgtgccaccatgcccagctaatttttgtatttttagtagagacggggtttcaccatgttggccaggctggtcttgatctcttaacctcgtgatccacctgcctcagcctccaaaagtgctgggattacaggagtgagccaccgcgcctggcctgtttacctttcttctatctggtctctgcggctcccaccccaaagccagctcaaatgctggggctctgggctcctgccctagagttgtagtaaagatcctgccaacaagtctgcaggctgcttggtcaggttgcctcctgggcactcagcttgctggagaacaatttattttctgttaccttctgagaaaagaaaataacttttatgtgaagaatgcaagtcctttcaaattatcaggcccagggagacattaaaatgagatggtggctgagtattgtggctcacacctgtaatcccagcactttgggaggtcgaggtgggaggatcgcttaagcccaggtgtttgagatcaacctgggcaacatggcgaaagcccatctctaaaaaaaatacaaaaattagccaggtgtggtggtgcatgcctgtggtcctagctactcaagaggctaaggtgggaggatcacctgagcctgggaggttggggctgcaatgagccatgatcacgccactgcactccagccagggcaacagagtgagaccttatcttaaaaaaaaaaaaaaaaaaaaagagatggcattcatgtcctacccccacaataagctatgtattcatctcttgaaactgcttgctgttgccacgagtagttataaattaacctaataatggggcaccagacgctagaacccataccctgttgcttaacaatgtatatagccaatcattgttatttctgtaaaccaatggggatccctgacaaacaactttgtatcagcccattccctgtccccctttttttgcctttaaaggcaaaggaggacaggggagctccccttaatggggagctcattccaagtttccttgggtctgagtcttcagggcagctgtcctcactttggctaaagtaaagtctttaaattatattttgtgcctcagcctcttccttttaggttaacacttcccagaagccatacttcaaatggcctctctgtacctgcttctagactggaagtccaccaggacattggcttttgccctgtacatggcaaacacagggctctgtttctttttttattttttatccaaggagaggtacagaagagtgcaaaaaacacatatgtgaaaccagcccaattgtccaatagaatatgtttatggtttattttgaataaagagagaaaattgacctgcccagtcttaaaacttgagaaacttacatttgtcttatctgagttccttttggaggaaaccaaccatcaggtctcccagatagtatcaagaaactgaaacttaccagatcaccacatttggacaatgagacaccagatccttcacctgtcatgattgcctaacccagcggttcccagcttttttggcaccagggacaggtttcatggaagaaagtttttccatggggtgtggggttggggctgatgggtatggtttcaggatgaaactgttccacctcagatcatcaggcattagttagattatcataaggagcaagcaacctagatccctcacatgcgcagttcacaatagggttcgagctcctatgagcatctaaggtcatgactgatctgacaggaggtggagctcaggcaataatgctccctcacctgccactcacctcctgctgtgtggcccagttcctaactagtccatggcccaggggttgggacccccggcctaaccaaccacctgcttcctgttgaacaattcttcttccttatccctccctatttcctgtttccccacacatagttacatttcttccttgctatataaacccctaattttagttagctgaggaaatggacttgagactgaactcccgtttccctggctgcagcacctgaaaaagctttgttttcccccggcgatactcattgtcttggtgactggctttctgtgtggcgagcaatgggatctaggctaaacccttggtgtttcagtaacatatgtacagtttaaagaaaaattatgtacagtttaaataaaagtgggcactcataaccaccactgactgcgtcttttacatttttctctttatattttttctctcatgttcttggagtagtggtgacccccaccgtgggaacctccagtactatcttaatagagtacatctgtccactataactgcagtttcagtgtcaaacgctctgggtcctaggatattctggtctcttggagtcttgggttttgtgagtagccccagaagctttacttatttagccccactattttcttgctaggtatggataccattattgccttttcctcctattaaataattattacctcaatatatttattttgaggtatgtatatgtttactcagtaagtttattacctcaatatgtttgtcctgatggcttgtcagttcaagtctgtgagctctcttctttattccacctgcaagaaaagacagggccattttgtatatggggcatattgccccagtgctgaaggtataaagcctacaagctttcaaagattgtgtgtgtgtgtgtgtgtgtgtgtgtgtgtatgtatgtatcccaaaatataaaaattacaaaactgataaatgtttaagtaacttcaaattaacatatcaatttcattacacgttaaactaggattttatacacattttacattttgtagcaatttgagattaggtttcttatttcacaagaatgtctgatcatttacagatgctgagaaatcataggtaattgtaaattataatagttacttttggattaaaatttttcaagcacgaaatttttaaaaaacactttatcttttatagcaaaagaaaggtaatataaggtctggatgtaacttcatgtctttggtacggtgtggagctagaattccagaagcaatagattttaaaacatctttagggaaatgggtgaattgaaatgagacataagggagatggcaagagagtgaaaagaagcgcgttctaaagggggaaaggagaaagggaaaggaaaggagaaaggcatctctaaagggaaaggagatgcctgctgagcgtctactgtgtgccctgcgctgttccagaagttgaggatccaaaactaagtctaggctccccaaagaagtcccactctggtaaggaatctgacaagtagttaaatgatacaaagtgttaactgttgttaaagaagtgtgcacactgaggggcaagatggtaagggcgagaactcccatgggacgggaactaggaaggcttctgggaggtgacgcttgatctgagggtaagcaaaggaaaaaaaggaaagagagacagaaaggaaaaacaaggaagagacaagaaaagggagaggaagaagggctcgatgcgatcggcgctcgggtagtcaggcgtcgactgctagggtctgaccgcggtccccacccccgtcccgccccctgcccttccctccgccccgcgccgcggctggcagggtgtgcgtgagtttggtggcggccggctgtgcagagacgccatgtaccggctcatgtcagcagtgactgcccgggctgccgcccccgggggcttggcctcaagctgcggacgacgcggggtccatcagcgcgccgggctgccgcctctcggccacggctgggtcgggggcctcgggctggggctggggctggcgctcggggtgaagctggcaggtgggctgaggggcgcggccccggcgcagtcccccgcggcccccgaccctgaggcgtcgcctctggccgagccgccacaggagcagtccctcgccccgtggtctccgcagaccccggcgccgccctgctccaggtgcttcgccagagccatcgagagcagccgcgacctgctgcacaggatcaaggtgcggccactggagcggggggcgtagggggccggggatccacccctgtcggcggtgctgtcgggggctgagtggaccccacccggggcggcggggtgcccgcgatcggcttccgagaaagacttcccatttccccaccgccgagccgtggtcagacgctcttgggggttccccaaatctgggtggaggtcaccgcctgtctcggggaccgccccttccccctagggggcggacaggcacatcccttgctgttagtgagtgaccatggcctgggacgaggtgggcggggcccaggtggagggggcggggcccaggctcagggggcggggccttggaaggtccccgaggagagcgctgggctttttcagcaggcccgtaactgtcggttctttccccttcggtcttaggatgaggtgggcgcaccgggcatagtggttggagtttctgtagatggaaaagaagtctggtcagaaggtgggttcagaaaattgttgttttgttctgtgccagttggtaaataaaatattgttttactggttagagtggatcccatgaaatgctattgcatttacataaaacgatgcatattgta

SEQ ID NO: 198 - DNA, 6000 bp, Homo sapiens
tagttctcacactgccataaagaaatacccgagactgggtaatttataaataaaagaggtttaattggctcacggttctgcaagctgtacaggaaacacattgacttctgcttctggggattcctcaggaagctcccaatcatggcggaaggcaaagggggaaccagcacttcacatggctgacgcaggaggaagagagagagcagggaggtgccatgcacttttaaatgatctgacctcgggagaacttactatctccagaacagtaccaaggaagatggtgctaaaccattcatgagaaaccatccctatgattcagtcacctcccaccaggccctacctccaaccttggggattacaattcaacatgagatttggtggggacacagatccaaaccatatcaggtagagaaactcttctctaaacctaaccaatacatttcacactctccaattgttgttgctttataatcttaacctctcaatctcccattattagatttttcttttttgagacaggctagagtgcagtggtgtgattcagctcattgcaacttctgcctcctgggttcaagcaattctcctgcctcagcctccctagtagctgggattacaggcacgcgccaccacgcgtggctaattttttgtatttttagtagagacgggatttcaccatgttggtcaggctggtcttgaactcctgacctcaggtgatctgccacctcagcctcccaaagtgctgagattacaggtgtgagccaccgagcccagcctcattattagatttttttaaaagattcttattctgaaattactccttggtgctattgtctctgctgatcagttatctgccacattctcatgatgtcacttattcatacctggcaccagtctcactaacctctggttgcatgatatggtagcaaaagtcccagacatgacttttcttgtgagaattctgctgggggcatttgatggagaggtcctcatgcctatctaaacacagggaacctgccaccttcctgccacctcccccttcctgccacccagggctatttcagtgcccacctctgctcctggtgtttcctgtgagctcagcactttctacactgtactgtcatcccatgagcagaaacaggagcacgggcacttcccaaggccacagattcctgccttgttttcctcagtggaattctcaagttacaacccagcagccaaagggatcctctgaacccagggagtagctaatgagtatggggcactgacttggtctaagcactgcgtgaacaaatttaatccacagagagaccttatgaagtaggtattgttttttccattttacacttgggaaaaaccaggcgctgagaaactaagtaacttgctcagctcacacagcttgtaagtggtagagttgggatttgaatccaggtaccttgattgcagagctcaacatatgcacccgacccctactccaggcctctctcatctcagcctcctccctgctgctggcctaagcctcttttggggctagcctgcaccatcaccgtggcaacctccagtaacccctcccattagcccacaacttgcagccaccctgtcttgttcacactttgagctctcagcccacactgttgctgagggggaccaagagggttatctcttgtcctgtgtttgcttaaacatgccaggcatcaggctactgtttttatttagagacatggtctcaccgttgcccaggctggagtgcagtagtacgatcatagctcactgtagcctctagctcccaggctcaagtaatgttcctgcctcagcctcctaattagttgggactacaggcgtgcaccatcacatgcggctgattttttaaatttttgatagagacaaggtctcactatattgcccagactggtcttgaattcctggcctcaagcaatcctcctgtcttagcctcccaaagtgatgggattacgggaattagccactgcacccagctgcaggctactatttttatcccaacttcaaccgttaaagccttaatcaggcaaaagccaggatttattctcaattagggattggttaaggacacactctgcctcacttcctagacagtgaattcctgaggggaaggaacaaactccttttcatctcaatgctcagctgcacctggcataaaacgtgcacctactaaatgtgctgtggaataaacagatgaatgaactcctgatgctccccattgcagaagactgcgaaagcatagcactcatgagagttggcaaaggacttgggcagacctgggcttgaagcccaaggtcactttgaagctatgatgctggaccatgtacttaacccagggcttggcaacttcccttgtgtgaagagtcagacagcagacattttcagctttgtgggccataaggcttctcacatagctattaatactcaactctgtgttatttgtaaaaatagccagagataatgtgtccggaattggttccttctgtgggttcttggtctcgctgtcttcaagaaagaagctgcagaccctcacggtgagtgttcctctaaaaacgaaaccaaaccaagaaactgagtcttgctctgtcgcccagactggagtgcagtggcgccatctcggctcactgcaagctccacctcccaggttcacaccattctcctgcctcaccctccccagtagctgggactacaggcgcccgccaccacgcccagctatttttttttgtatttttagtagagatgggatttcaccatgttagccaggatggtctcctgacctcatgatccgcccgtctcagcctcccaaagtgctgggatcataggcatgagccaccgtgcccgtgagttacagttcttaaagacggtgtgtctggagttcgttccttcagatgttcagctgtttcctgagtttcttccttctggtgggttcgtggtctcactgacttcaggagtgaagccgcagaccttggcagtgagtgttacagctgttaaaggtggcaggtccggagttgtttgttcctcccggtgggcttgtggtctccctggcttcaggagtgaagctgcagaccttcacagtgagtattgcagctcataaaggtagtgcagacccgaagagtgagcagcagcaagattcactgcaaaaaccaaaagaacaaacattccacagcacagaacaggaccccaacaggttgccgctgctgtctcgggtggccagctcttatactcttatttggccccacccacatcctgctgattggcccattttacagagtactgattggtccgtttttacagagtgctgattggtgcatttataaatctttagctagacacagcactgattggtgtgtttttacagagtgctgattggtgcatttacaaacctttagctagacacagagcactgattggtgtgtttacaatcctttagctagacagaaaagttctccaagtccccacctgacccagaagcccagctggcttcacctctcaataatacctaagtcaatgggtgtggctgtgttcttataagcttttatttacaaaaataggtgacagcagtgtgctgatctataacttactgtaaaaaaaagattgtagaagaagaccacatgagacaacccatgaaggtagcccgaactcttgtgctggaatgtccttgagcaggagtgcacatactacatcacattaattccatttaactcaattgactgagcctcactacatggcactcgaatggatcgtagtttgtttttctctcaagtttcttgggaggcaatgccaccaaacatttgagaagtagcattgtgaaggaagtaagaggttgggattctggaaccatactgcttaggtcatagttctggctctgacacttaagacatatgtgacctttgcaaaattaacttaacctccctgacttaacctccctcagttgccctatctgtaaagcttgggtgacaataactgtctttctctctcaaagggttgttatggggactaaacgggtccaaatcacctgaggctttctaaagattccaaaacccagaccacatacaaaccaacaaaatcacaattcctgggggtaaggcggaggtgtcaacctaaaagaagagtttatttaggcgtaaagtgtgaggatggaccacccagaaacaccaactccaaaggaatggatttggcattctaaaatagggaagttaaggtttcatttatataggtagagataggaattttgagcaggataacagtattcctacaaggttggcacacaggtacagcaatttgattggttattggtttctttttgggaagggaacattgaacattttttacatagggtgtaataatcataggttttatgtctctggtctaagcaaaacaggataacagagggaagaagttataatctataacaaggttcattacttaacaaggcaggagcttttgtccctgaagccgtttaattcttcctagacatcgttcaataaaagaaagcgagaatataatgtgggaatagaagttgtaagcatacgtgactgacattacagtcagttcaaggcttaaaatattttttcggtgggggggttccaacagcttttcaattttattttcacaggggcatcagtatttttgaggctttcctaagtggctccaatgtgcggacaggtttgctccaagagctggtatgatctttcggtagatgcttctggaatcaccgcgcccccagacctcaagtacctcggattccccacctcacttcagtgcgcaactactgcccctccacccccgcgcccagcccagaagcccctgcccatgcacactgggatttgtagtccctttggctcgccggcctcgtcctctcctcccattggttttggcagatgccacgccccatagctccaccagtcaccgcggcacagtggcccttaagcgaggagcggcggcgcccgcagcaatcacagcagtgccgacgtcgtgggtgtttggtgtgaggctgcgagccgccgcgagttctcacggtcccgccggcgccaccaccgcggtcactcaccgccgccgccgccaccactgccaccacggtcgcctgccacaggtaaccgcgagccccagcacagaaccgggttcagtccccacgcccgaggccagggcctcccgtctgctctctcaggctctcgacctcagggctgggattttcatttttcccgtccctttctgagtaatcagtttctcaccgtgcgagggggaatttcaggaaacagtgaatcccgagggaagggaaaccctgtggcctctgcttggtggggctgggggtggaggtttctcgtttctcacgcgtgttgtggctggaagggctcagtgctctggagggggaaactgaggcgcgggaggagacgggatttgctgagatcccgcagccaagggcccctactgggactggggcttggttccagcctttacgacctaggaacagttcagacttttgatgttcttaatgtggaggattgcacccgtgggaaagggctattaacgacgacaacagaaatacccaagcttataaagacatctatttagagaagtcagggaagctctggttctgggaggtttgagctggtgagagtttcaggaccacccgcttcaatcttggaagtgaaagttaactggtttcctttcccgtccctatttgatttgaggttatacctacgtggagtgttctatgccaagcattatagtatctgggggctggaagaagaaactttgtgtcgcgtgctttgttttatagatgaaaaggagtgcccagggtagttgactagccctgtggtatgtggtgaatggagtagcccagctttctttactctgggacttgcatagcaaacattttcgagccttactaagctttttgagcagagattgtttcataaaggggagagacaatctctagtgaacagttccagtgttaaagggctggagtatacacgtgtgtacagg

SEQ ID NO: 199 - DNA, 6000 bp, Homo sapiens
ccttccacacatcacagcacacacaggaagagactgctcttgactgcaggtgactcgccaggatgtctagctgccccaggccctaccaccccaaggattgaggggctggctgtctcagcacaccagtaggagattcaagaaatactaggccaggcgcagtggctcatgcctgtaatcccaacactttgagaaactgaggtgggagagtcacttgagcccacgagtttcagaccctaacctgctgggattgcaggcgtgaaccaccgtgcctggccaagaaatactcttaaaatgaataaagtcatgctaaagagcatttactgtgtgctagacactgttccaggggctagtgaacacagaacctgcccttaagaagctcttactgtagtggaacagacagacaaatggacaaacaataacaatagagccataccctggtatactcaagggattggttccaggaaccgcctcccccacgtccccaaccttccaaggataccaaaatctgcatatactccgcacatactcaagtcctgcatatggtcctccatatccatggggtttgcatcccaagaacactgtgttttccatctgcctttggctgcataatatctgtgtatagatggactagtgcagttcaaacccacgttgttcaagggtcaactgtactttcagatacatgagattaactcagagagttatgagatcacagagggggatcttacccagatttgagaagtcagaaatttccaggatggtaaaatataagtttagaccttcaagtaggtggagggattggaaagtgggaaaggcattgcagagagaagagagtatggtagaggaccaggaagtgaggtaatcgtggcacattttcttttgctagccccataaaccctttgttcaatatgtcatctctttcacatctctgtgctttgcctatgctccccttccctgcctggctaactcatgctttgggagtcaattcaaagttcacctccattgtaaaagacttcctgaggcaaattatttatttcctgcttctttctgatcccttaatttatgagccaaaaacctgaacacattgtctgacagtgaattatttttctgatatgtaaattaattttattagaagctatagatatgaaaattaaatcatgtttttattcatttaacaagctgcctttaataaagaaaaaatagctctcagcttttggctcggaggaggccaaggtgcaactttcttcggtcatcccgaatccgggttcattcgacaccagctgcctccaccatgccgccaaagtttgaccccaacgagatcaaagttgtatacctgaggtgcactggaggtgaagtcggtgccacttctgccctggcccccaagatcggccccctgggtctgtctccaaaaaaggttggtgatgacattgccaaggcaacgggtgactggaagggcctgaggattacagtgaaactaaccactcagaacagacaggcccagattgaggtggtgccttctgcctctgctctgatcatcaaagccctcaaagaaccaccgagagagaaagaaacagaaaaacattaaacacagtgggaatatcacttttgatgagatcgtcaacattgctcaacagatgcggcactgatccttagccagagaactctctggaaccattaaagagatcctggggactgcccagtctgtgggctgtaatgttgatggccagcaccctcatgacatcatagatgacatcaacagtggtgctgtggaatgcccagctagttaagcacaaaggaaaatatttcaataaaggatcatttgacaactagaaaaaaaagaaaaaccatcaaatattatatacagtatgttattattttttatattcatctactgtccaaattgatggcaatgttgtatatatactaatttaaataattcatattgttaaaaactgtttattcatttttaaatttaaatttaattttttttgagacagaacctccacccaggctgaagtgcagtagcgtgatcttggctcactgcaacctctgcctcccaggttcaagtgaccctcctgcctcagcctcccaagtagctgggattacaggtgcctgccaccacactaatttttgtatttttagtagagatggggtttcaccgtgttggccaggctgatctcaaactcctgacctgaagtgattcacccgcctcagcctcccaaagtgctgggattaaggcatgagctaccatacccagtctaattttaattttaagtttttttggtatatagtaggtgtatatatttatggggtacctgagatgttttgatataggcatccaatgtgaaataagcacatcatggagaatggggttatccataccctcaatcatttatcctttgagttataaacaatccagttacactcttttaaaatatacaattattattgactatagtcaccctattgtgctctcgaatagtatgtcttattcaggctactttttttgtacccattaaccacccccatctcaaaaaagaaaaaaataaagagagatgggatttcctcgtattacccatgctgatcttgaactcctgggctcaagtgatcctcccatcttggccttccacagtgctggaattgcaggtgtgagccaccatccccagcctgtgatccatttttaattaagtttgtgtatgctgtgaggtaggggatcatagttcatttttcccacatagggatatctattttcttcatcaccttttattgaaaataacttgccttccccactaaattaaattggtgtcttcattgaaatggagtaataatcaaatggctcttttcctggaccctctattccgttccatctatttgtctgccattatgccaaaaccccactctagtgtatagtaaggggggatattttggaagatcaacaaatttatcttgtgtaacttacttttatgtatgcataagaatatttggtttaaaaatctggttaagtctaaaagagctctttcagtaataattaaataactgaatccctgtaatccaccatgctcagccccattagtaatttttatagcgtctttatttggatctagctctttcatcttgtgtaactcttttaagtaaatgactcctcccttctggtacaggttgaatatccataaaagggtgccttggcatgtgctcagtcctgaaattctactttgatctactgctctcatctttgaaactgctctaaacactcccccaaattattgatcctgtgggcctgattatgaacttggctcttctgacaatacttctcaaatcctgtacctttggtaacatctctcctgactggcagagtacccagacacttaattaatgctgatgaaaattaagatttaagcaaagaagaaattggtgtaagaatgcaagccttaggatctgaaacttgatgactgtgggatctaatttctgcttcttttgctacaagctctgtttttgaataatcaactttcaaagacaaattgcttgatgaatctctgtattgtcagaatgtttctttgatttcccatcaaagccatgtatgtgtaactagtaattaggtacctacgacctgaatataaattatcattatttcagtagccctttatttgtttttgagaaagggtttcactatactgcccaggctaaacttgaactccttggttcaagtgatcctgccgcctcagcctcctgaatagctgggagtagctgggactacagggatgtgttatcatgcccagtgaaagccctttatttttaaaagttcattttcctgatctttacatgtattttaatactaaaattaaatttaaaaattttaaaaagtacctactaaccaaataatgccacccaataacaatagcattatttgtattatgttctggtaatatagtggtgaacaaggaagacagggtctctgataactgtggaattctccttgatcacttctcaagcctctcttccggatactatttcttggatctacagctgtcttccttccccacttctgtagttcagtctctcattattctctacctccaataaaaaggggcctcctaactggtttcttatgcaactactcaacatggtatttctaaaatgcagatctttcgggatgattttcaattgctcagagaataaattccttgactttctacgtaaggccctgcaggaccaggcccctgtcattatctctgagcactctccatcttgcacccaaagccccagcaatatcttactgctttcagtaaatacacaccgggctatgtggggttttgtctggggaaaggggatgtgagttgtaactaagagatttatagtcaatcttgaagggaagagctcatattggaggcaatggaatgcctcaagctggctctgaaagtacacattttttccagtcataagtagatcacatttgtgtgatcttgtgatcctctctctagcagagccgtgcagactacctacttccggccctttcttgccccacgaaatttcacatcacaacgacttgtggttttaatcctccgtttttctgcttctgaagttacttcagcctggcaagtcctttacctccccgtaggcctggcgagctgcatcacaacattcaagattcaccctagagccatctgggaaactttcttctccaggtcgccctgcgtcctcgcctccccaccccgttcttctcgagtcgggtgagctgtctagttccatcacggccggcacggccgcaggggtggccggttatttactgctctactgggcccgtgaacagtctggcgagccgagcagttgccgacgcccggcacaatccgctgcacgtagcaggagcctcaggtccaggccggaagtgaaagggcagggtgtgggtcctcctggggtcgcaggcgcagagccgcctctggtcacgtgattcgccgataagtcacgggggcgccgctcacctgaccagggtctcacgtggccagccccctccgagaggggagaccagcgggccatgacaagctccaggctttggttttcgctgctgctggcggcagcgttcgcaggacgggcgacggccctctggccctggcctcagaacttccaaacctccgaccagcgctacgtcctttacccgaacaactttcaattccagtacgatgtcagctcggccgcgcagcccggctgctcagtcctcgacgaggccttccagcgctatcgtgacctgcttttcggttccgggtcttggccccgtccttacctcacaggtgagtcggacttgtcccgccctgttcctgggccctgagagtgcctgcctggggacagttcccccagggctccagagacgccctatgggcttttgtccagccctctgatcacaggcactccacttcctcctcgagctgcattaggttttcatccaaagataactactataggactacggttcaatcaggagattaatttatggaaaatactgtgccagcagaaatctaaggtgatccttctgaccgtgttcaagctagccagggtcctagtgagactgtgagcaagggctgagtagagaccagagaaaacactcaaaattggggagacataatacaagaactatgcaaagttacatacaagtttctggcacatagaatgtttggcgggcggatcacgaggtcaggagttcgagaccagcccggccaacatagtgaaaccccgtctctaccaaaaacacaaaaaattagccaggcgtggcggcgcgcgcctgtagtcccagctactcgggatgctgaggcaggagaatcggttgaacccatgaggtggaggttgtggtgagctgagatcgcgccactgcactccagcctgggcaacagagcaagactccctctcagaaaaacaacccccccccccaaacaaaacaaaacaaaacaaaaaaagtgtaaattgtgaaagaaatcatagaacataaggaagtgagtttccagcggccacttggaa

SEQ ID NO: 200 - DNA, 6000 bp, Homo sapiens
ccagtactgcatatggtcaacttacaggcttcccagtagtacacagtcaaaaagtcaaatgctatagctggactaactggtactagaattgcaaagttataatcatattaaaagactaactttagattttttatttgcaatgacaacataatacaaagtcagtagctcttgattttcttgctatattatatccagtgactactgacgctaatgtggaacatttcctgctagttattcattgattaaaaaaaaggagtcattttttttttttccagagactgggcaggagataagatgtcaagaagtaataagtagtgaaatgaaagaggagaatgcaaaggaaccaaaagagaaaacattaaaatgatgttattttttcccccttgtgtatgcagatggacaggaaaattagagcagtaattgcagactccttttcactgaagacagaatggccttggggaatcagagtatgggagaaaaagttcagtgaaactacattctcatccaggccccaactgacttgctggatatggctttgtccgaggtcatttaccctttctgtgccttagtttccttaactgttgaaaaacattatttaccattttaagttactgagaagatgaatgagatcatgctccagaaacacccaaaactggtcacaaaattaggtgctataagaatactaagtagtactattattactgtactgtgcatcctgttggaatgagtcatcttgctgcaaagatgcataagcgattccaagtgtggtaaaagaccagagacaatgagaagaggcagtttactcttagatggcattaagggagaagatcccagtcgcagtgaaatctgcccttgttcaacgaacaaaagcaggaggaagggagacaagactctcttttcttttttctttttttttttttttgagacggagtctagctctgtcgcccaggctggagtgcagtggtgcgatctcctctcactgcaagctccgcctcccgggttcatgccattctcctgcttcagcttccggagtagctggggctacaggcgcccgccaccatgcccggagaattttttgtatttttagtggagacggggtttcaccatgttagccagtatggtctcaatctcctgacctcgtgatccgcccgcctcggcctcccaaagtgctgggattacaggcgtgagccaccgcgcccagccaacaagacttattttttaactacaggcatacctaggagacactgctggttcatttctagaccagcacaataaagtgaacatagcaataaagtgagtcacaccatttttttggttcctagtgcatatattagttatatttattatactgtaatccattaagtgtgcaatagcattatggctaaaaaacgtacatgccttaatttaaaaaatactttagccaggcgcggtggctcacgcctgtaatcctagcactttgagaggccaaggcaggtggatcacctgaggtcaggagttccagatcagtctggccaacatggtgaaaccctgtctctaataaaaatacaaaaattagctgggcatggtgatgcgcacctgtagtcccagctactaggcaggctgagacaggaaaattgcttgagcctgggagatggaggttgcagtgagctgaaattgtgccactgcactccagcctgggcaaccaagtgagactccatctcaaaaacaacaacaacaacaaaaaaaaaactttaatggttaaaaaatgctaatggatcatctgagtctccagcaagtcttaatcttttcgctggtggatcttgcctcaatgttgttgaaggctgctgaccagtcaggctagtgttgatgcaggtaagagcagttgttgcagtttcttaaagacaatagagaagtttgctgcatcgattgacccttccttccatgaaggatttctctgtagcatgtgatactgtttgacagcattttacacacagtataatttctttcaaaattggaatctatcctttcaaaccctgccactactttatcaactaagtttatattatattctaaactatttgttgtcatttcaacaatatttacagtatcttcaccaggaatagattccctctcaagaaatcactttctttgctcatccataagaagcaactcctcatcccttcaaattttaccatgagattgtggcatttcagccccatcttcaggctctatctctaattctagttctcttgctatttccatatttctagttactgcctccactgaagtcttgaacccctcaaactcatccatgagggttggaatcaacttcttccaaactcttgataatgttgatcttttggcttccttccttaagtcacaaatgtccttgatggcatctagaattatgaattttttcaatttactttttccagatccatccaaggaccccctatctctggcagctatagccttatgaaatgtactttctacataataagacttgaaagtcacaatgactccttgatccatgaactgtggaatgcatgttgggttagccaacatgaaaacaacactaatctcttgtatgtctccaggagaactcttgggtaaacaggtacactgtcaatgaacagaaatattttgaaaggaatcactttttcttttctttttttttttttttttttgagcagtaggtctcaacagcagacttaaaatgttcagtcagccatgacagatgtgctgtcatctaggctttgttgttccatttatagagcacaggaagagtatatttagcataatttttaagggtcttagaatttttggaatggtcaatgagaattggcttcaacctaaaatcaccagctgcattatctcctaacaaaaaagtcagcctgccctttgaagctttgaagccaggcattgacttttcctctctagcagtgaaagtcctagatggcatcttctttcaatagtaggctgttttgtctacattgaaaatatgtttagtgtatccaccttcaatgatcttgactagattttctggataacttgctgcagcttctacatcatttgctgcttcatcttgcactattatgttacggagatggtgtttttccttaaatccctgatagcttcaaccttttcttctgcagcttcctcagctctctcaaccttcataagattgaagagagttagagccttgctctggattaggctttggctaaagggaatgttgtagctaggttgatcttctccccagaccactaaaattttctccctatctgcaatgaggctgttttgttttcttataattcatgttttcaccagagtagcattttcaatttccttcaagaacatttcctttgcattcccaacttgtctaattatttgacacaaggccgagcttttggcctctcttggctgttgatacatctgagcttaatcgtttctagcttttcatttaaagtaagggacatgcaactcttcctttcacttggtcacttaaagggcattgtagggttactggttggcctaatttcaatattaggccattattattagacaattattagtgtttcatttcagggaatatggaggcccaagatgaagcagagagacagaggaacagctggttggtggagcagtcagaacacacacatttattaagtccctgtcttacatgggctcagttcatggtgccctcaaaacaatttcaacagtaacatcaaagatcactgattacagatcactataacaggtacaataatgaaaaagtttgaaagattgcaagaattaccaaaatgtgccacagagacatgtagtgagcaaatgctgttgaaaaacggtgctaggacttgcttaatgcagagttgccacaaaccttcaatttgtaagatgtgaaagatctgcaaacagcaataaagtgaatcgcagtaaaacaaagtgggcttgtacagcaaggaggttatacaaatatacttttgaaatcctacagccagtttgaatccaggctttggcagttattactatgactgggcaaactactgtgtttttaaacttcatttttcctatctgtaaaatggggattttttatagattgtgtgtgtgtgtgtatatatacacacacacacacacatatatatatatacacacatatatatatagttgttgtgaagatttaaaaatgtacaccgtcacaaggactccataaaataagctattattgtaatctattggagacagggcaagtaaaaatccacactgatgttaagtgaatctttaaaaacaagtaccagaaaaagacgagtttttattttataagatatgacctaaggggcctaggaagagaaaaaacttgttttgtcaagtctaaatccactcatatttcatggggccacgtatcacgtccaacctttgatatctggcacacaacaaacaaacaggaaaggcctttcgtgtgctttaataaaaacagctttccattttaaaacgataaatatattggaaaaatctgttggctctccaacagctcttataaaacaaagctcagacgctgtgtttttgttgtttgaaagagagaaatcaggggcttgggcattattaggctccctttgatcgcgccctgggatgggaagccttcgggcaaagccctgggggcaggacgcgtttttttttttttttttttttttttttaatcgatcccggaaccttcgcgcggcggagggggcgggcgcgccgcaggggcccgagggaggggtctggggcgcggcgccgcttgcccatcccccgagcgcgcggcggggcggccggccggcggccgccgggatgcggaggggcggcgacgggggccggaccctgccggggcggcggggcgggcaccgcccgagggggtagggcgcgcgcgggggcgcgccgggccggggaggcgcgctcgctccgcgctcccttcgctcgctcgttccctcctccctcggcagccgcggcggcagcaggagaaggcggcggcggcggctagggatcagacatggcggcggatctgaacctggagtggatctccctgccccggtcctggacttacgggatcaccaggggcggccgagtcttcttcatcaagtaaagagccggggacggcacgggggcccgcgggggcgggagggcaggaggcgggcggctggcgacacgggggagagcccgggtctgtgctcctgcagcccctcggctcgcccccgcgtcccctctcacgctccgtgtctgccccttctctcacccctgcagcgaggaggccaagagcaccacctggctgcaccccgtcaccggcgaggcggtggtcaccggacaccggcggcagagcacaggtaacgccgggcccaaacggagttgggctccgcctggaggaggcggcagagcccgggccgcccggctccccgcaacctgccccgcgccgcgggccccgggaggcggcgaggcggggcggaggccgggcgggagcggccgcaggtagaggggccacggggactccgccgccgggagttctctccagtctcggggcgcctctttctcctcagcctttcatcagcacttggagacggcgccctcttcctgcgccttctccccccatcccagcctagacgaccctcgcgaccctagagtggcgacgctcccctccctgaaacctggagtcctgagtttttcctccgcggccgctactcactccccggtgacccccagctgccgtcttgccccccagcaatcttcaggcagtccttacccactcccctccctgcagccccggaccccgatcgcccgccgggataacgtaaccacatcctccccctcctcccaggagcgctgcctcctgccgtgcagcttcctcctcctaggtgggacttgtgggtaggtggctgatgaaggaggaggaggaggaggagaggagttcgggggtgctgcgatcctctctgtgacagggaacggctcgggaaacgcttggcgcgttccctcctgccacgggaggagcagccg

SEQ ID NO: 201 - DNA, 6000 bp, Homo sapiens
gagccagaccctgtctcaaaaacagaaagaaaaaaaaaatagcaataagtgccaggagaaaaacactagggaagaggattaggaattgtgcatgccttcatgcttgtatctatgggtttgaggatggcctgcaatctcaataatgtgccaagggagagcctcagcaagaaggtgacctttgagtcaagacctacagaatgtgaggtaatgacccatgcagatatctaggttaagagcaatccaagcagaggaaatggcaaatgcaaaggccctgaggtgggatgcgggacatgttcaaggcacagtgaggaggaggctggtaggagtgagggagattagtaggaaatgaagtttgagagtttagatgggatgaggggcagaatgtgtagagttttgtaggccaagaaaaggattttggcctttttcctgcacaagataagaagctgtttggagagttttagtcaaacaagtgacttgatctaactgtggcaactgggtagataatactgttggtagtaggggcaagggcgaaaacagaagatgaaagaatagtttggactggggtagtagcagtgaaggtggtgagaaaggctcagattctggattaaggattcgatactgggatcagggtaataagagatgaaagaaaacctctctgaatttataacagcaaaatgtaatttttctccttaaaaaaataaatcacaacaacaaaataaccctattaaaatgggcaaaaaaaaaaaaaaaaaaagccaggtgcggtggcttatgcctgtaatcccagcactttgggaggccgaggtgggcagatcgcctgaggtcaggagttcgagaccagcttggccaacatggtgaaaccccatctttactaaaaatacaaaaattagctgggtgtggtagtgcacgtctgtagtcccagctactcgagaggctgagggaggagaatcccttgaacctgggaggcggacgttgcagtgagctgagattgtgcctctgtactccagtttgggagatagagcaagactctgtctcaaaaataaataaataaatacacaaaatgggcaaaaaacttcaataggtatttctccaaagaagatatacaaatgagcaacaagaataggtaaagatgttcaacatcactaatcattagagaaatacaaattaaaactacagtaagatatcacattatacccaacaggatagctactataaacaaatatagaaaataaccagtggtggtgaaaacatggagaaattggaactcttatgcacttttggtgagaatgtaaaatggtacagccactctggaaaacagtatggtgattcctcaaaaaattaaacatagaaaatatgatccagcaattccacttttgagtatacatcccaaaaagtcgaaaggagagacaggaacagatatttgtacccccatgttcatatcagcattattcacaatagccaaaaggtggaaacaacttaaatgttcattgatagatgaatggatacacacaatgtgttatatacacacaacagaattttgttcagctttgaaaaggaaggaaatggccaggggtggtggctcatgcctgtaaccccagcactttgggaggccaaggtgggtggatcacctgaggtcaggagttcgagaccaatctggccaacatggtgaaaccctgtctctactaaaaatacaaaaattagccttgtgtggtggtgggcacctgtaatcccagctacttgggaggctgaagtgggagaattgcttgaacccaggaggtggagcctagatcatgccactacactccagtgttgatgacacagcaagagtacatcttaaaaaaaaaaaaaaaagtaaggaaatgctgacacatgttacaacatgatggaccctgaaggcattataccaagtgaaataagccagtcacaaaaaggcagatactggatgattctatttatatgaggtatctagagtagtcaaattcatagaaatagaaagttgattggtggttgccaggggctggagggaaggggaagtgggcagttgtttaatgaatatagagtttcagttttgcaagatgaaaatctggagattggctgtacaacaggatgaatgaatgtatgtaacactactgatctgcacacttcaaaatgagtacaatggtaaattttatgtgtattttatcacaaggaaaaaaatcactagacatctaacttttcagtaatgtgtctattttcagttaaatttgccagttaactgaagccaatataggccagttttcatattccttagtgttatcacactggtgcacttactgttttaccattttcccttctgatttcatttttctgttagcatttactactatctaacatatattttactcatttgtctgtgttccccatcagaatataacttcatgaggggagggattttctattacacttagtgaaaagtaaatccctcaagtaggaacactacaagtaagcacagttttttttttacagtaagtttgcttaatggctagtaaactatctcagccagtacctgagtgactattctgacttgtatcatttaacaagaaaaaaggcctggcgcgctgtctcacgcctgtattcctagcactttgggaggccgagacgggtggatcacttgaggtcaggagttccagaccagcctggccaacatggtgaaacctcgtctctactaaaagtacaacaattagctgggcgtggtggcacatacctatagtcctagttacttgggaggctgaggcaggagaatcgcttgaacctgggaggtggaggttgcaatgagccgagactgcgccagtgcactacagtctgggtgacagagtaagactccgtctcaaaataaataaataaaataaaataaaatgaaaaaaagtactaaatgcaaacttcttaagatcacatgcaacttcgatgttaaatactaaatattccttaaatttagacagtattcaatttggtaaagatcagaaagttatattttgtcatttatgatatcaagtggaatgtattatcagtgattatgatgcttctcgcaatgagagttataactttctggaaaaatccttgctcaaatcatcaaagttaagatttcttactacataaaggctatgaagagctgacgtgtaattatattggctctgcaaatattggaacagaaatatgagtttgccattagtgtaagaaaagcttcagaatatgtatgcaaatttggcaaattgagttggttttccccacggtacttcgaataaaagagacattttaacaaatcacaggttcatagaaaatctctagtttcgtggtctattttctaaaataataggaaatgaacttttaataaaagtacatgaggacttttgatgaacggtttatttttcacagaagtgaagtgcaggtgaaaaggggaaattcctagaatatctgaaggatctgactaaatgaatttctacctaagctattgatttacagtaacttaaaatgtgataatttatctcctacaatggcctttcaaattaaatataaaagtaactcagagtaaagtatgcagaaaaaattttggtattgtaactgaaaatgaccaacattaatttttttctctcacattaatcaagcaccttactgttagaagggaaactgacaagcctcctcaaccgagtttatacaaaattcaaccccagaaagtaaagccaattcgtgcaccttcataagaaagaaataaaggacgaacctacacattacaatttgtaaagaaacttctgtagaggcaccatcgttctacaaccttatgcactttaaaatctgaggtaacaaggcatttgaagataaccaaggttggccgggcgcggtggctcacacctgtaatccccccagcactttgggaggctgaggtgggcggatcacgaggtcaggagtttgagaccagcctggccaacatagtgaaacccagtctctactgaaaatacaaaaatgagcgggcacggatggcgcacgcctgtagtcccagttactcggcaggggttgggggctggtgggggtggtagtgctgaggcaggagaatcgcttgaatccgggaggctgaggttgtggtgagtagaggtcgcgccgttgcactccagcctgggcgacggagcgagactccgtctcaaaaaaaaaaaaaaaaaagataaccaaggtttattgctacttccgtgatatcaccatatcaccaactgcgtaagcagtgctatttagttgaaaatacatggactagaccgaatatttctgcaacagtttaataagagacgatgatgcgactactgcagctgtccccaggcaattaaactcttcggcgaatttctttactattgcttttgaacagggaactgtttgctattttagggcactcgtgcggtaaagaacttcactgaaaaatgcaaatatgttttgctaatgtgggagaaagatgatgatcctctgaacctgtgacttggaaggggggataaaaaagaactatttcttgaattcttgccttgctcttgctgattcgatgcacacaaccccacgaacattcagattcatggcttgacaaagtggggataaccgggagctgcagccccgtctttgaagcttttgtaaagacaaacggtctgcaatgttaagccttaaattggcttttggcggactccagccttttacccttcgtttggtagatgttttcacctcgctgtcattaagcagggtcaggaaatggaagggccgtgaccgggtcgccgcgggcgctctgtgggcgatgagggtctcctgagcgagcaagaccagtctctccccgactcgccacgcgccacgcgccgcgcgccgcgcgccggttcctcggcttcccacgccgggggcgcatcctcccgggagctgctgcccttttccaacatggcgccgcgggaggcgggtcccgctcgtcggctcccggggttccggcgccgcgcgttttggttccggagtaacagtgtcgccgccgccttcctcctcctcctctcgccgctaccgccgtcgccgccgccgcagccgccgccagtccgcgcggcctcgggtggccggagctcagcctgcgcgcgccgcgccctgtgtctccgggtggggcagaagactcgccccttgaacctcccgcggggactctccgtggtgtggcggccctggggctctttcttaatagccccggactgagtcccctccagtcgaggaccctctcctagtccactgacgagcggtggacacctgccgctgtatctcccccaaaccgagtccttgccctgctgcctcctcatacccacacggcggcagagaccttcaccatagcgttcgctcaactccagaaccttccgacctccgctagttcctgcgggcctttgcccgcttcccggtgcaccctccccgggagacacctcagacccccgacagcctgggcaggctcggtgcctgcgggtgcgttcctgatcacccctcccctcttccctccccctcatcctccattcccttgttttcaccctctgtcctctgcccgtcactccccttgtcacctcttggagccccctcctaaccagcggccagtgggtttcccataccccaggatgtgagcctctttaacctgtaatgctgtggctagcccttggcccctttcctgccatggagaaccaggtgctggtaattcgcatcaagatcccaaatagtggcgcggtggactggacagtgcactccgggccgcagttactcttcagggatgtgctggtgagtggtaatctcagtgtccggatgccagcaagggggactcagggacttgagtagtcagcaccttgaccactggtgacctgagccagtggcaatggctactgctggcttcctgtggaggcagttttattgcttcaggcacagcattgataaattgcaaccactaaaacctggcaaatgtctaggaccctggggagatagatcaatctgact

SEQ ID NO: 202 - DNA, 6000 bp, Homo sapiens
cagacgaggaaactgaggctcccggggattaagtgacttgcccaaagtcacacagtaatcagcagagccaggattaaaatccaggtatgtctgattgattctagagcccctgaaatctgcctcctaagaactgtcagtcaccatttatgtaatgcttattatgttctatggtagatgcttggcataaattatttaatctttgcaacaaccctctgaggcaggcattattaatagcctcattttacagataaggaaaaccaaggtttagaaaaattaagtaacttggcctaacacaactgaacatcagagtccagaacttcagcccaggcctctttgataccagaacagaattcttaataactaagctatactacgattcaggtgcctggccagaggacaaacataaactctgggatccttgggcattcatccatgccatgcagacctctctgtgaatagctcttatacatgccagtgtgtgggatattcctcaagaatgagctttacatgtacacatggagcacccgttctatcatttttaaagttgtggcttgacagacataatgctgcattcttagtacaaatctcatggcaaaatccactggatttgagccctaatcaagagatacagaaagtccaaacactgtcacatggattccaaataagggtttattgaaaataaacataaatgccctccattgactgggcttattagcatgaagcaaaaggcagatgctatttcctctttgtaaggttagttttgaggtcgtggccaatgtctggccctcttcataatctttaacagcactgcaatctcagcactatgtaactgtgccagctctaatcctctactctgaatggaattaaaaatggcttgaggccaggcgtggtgactcacatctgtaatctcagtactttgggaggccgaaatgggcagatcatgaggttaggagttcgagaccagcctggccaacatggtgaaaccccgtctctactaaaaatacaaaaattagcccggcatggtgagaggcgcctgtaatcccagttactcaaaaggctgaggcagaatcgcttgaaactggaagggggaggttgcagtgagccaagattgtgtcattgcactccagcctgggcgaaagagagaaactccatctcggccaggcacggtggctcacgcctgtaatcccagcactttgggaggccaaggcaggcagatcacaacgtcagatcaagatcatcctggctaacacggtgaaaccccgtctctactaaaaatacaaaaaatattagccgggcgtggtggcgggcacccgtagtcccagctactcgggaggctgaggcaggagaatggcgtgaacctgggaggcggaggttgcagtgagccgagatcgtgccactgcactccagcctgggcaacagagcaagactctgtctcaaaaaaaaaaaaaaaaaaaaaaagagaaactccatctcaaaagatagataataaataaataaattttaaaaaattgctctagctggccaggcacagtggctcacgcctataatcctagcactttgggaggccgaggtgggtggatcatgaggtcaagagatctagaccatcctggccaacatggtgaaactgtctctactaaaaatacaaaaattagccaggcttggtggtacacacctgtagtcccagctacttgggaggctgaagcaggagaatcgcttgaacccaggaggcggaggctgcagtgagccaagattgcaccattgcactccagcctggcaacagagcaagactcttgtctcaaaaaaaaaaaaaaaaaaaaaaaaaaaatggcttgagccaggtgaaaatgaaggcaactggatgaaattggtattgattctaaaagtttaaatgaggtgatattcatgcaacaaacgtaaccattttaaagtggataattcagctcatggctcatgattaataaccataggactagagaaggtgggttcacagtatttcttggagaaagctcattcagctatgatcatccataggcaatggaacaatgttttttggatgcactgggcctgaattcctttgctaatgtgttggaaatgtttgtgggtggcacaaccaagttattctgttaagcggactgctgacaattggttttaaaaagacagttcttcatctccggagatactgtagcatttattaaaaatgtagcattcactaaaaaggtagtatttattcgaatgtagcactcaaatatgcatttttatatgaaaatatactgcagacaaaatttattttagatatttttatttctccaaatttgttatttatcaggagtgactgaaataaaaaatacaattgagtcccatcatcatcatcatggaaatggctttaagagaaaactggtcagatgaatattattgcttcccattttcaaccagtaaatagttgccactgagaaactgacagccaggagtctgtcaagaatgctcaagatatgttatataatacaacatgcctgttcacagggggaaaaatcctaggaaataacttatgtgtacttcttgatttcatcatacaagacaagcacaaaagcaccacccatgcctctgagaacattggaccatgcacccttgaaaaaagctttgcctccttcatcacgagcaatcttccgccagcagtcaagcgtgcctgtgtacatgatgtcagctgcaaagaataaagacatggagttagtgactgaaggccgatgaaaaatcctaagattcactaggctaaataaagcagagccccacctctaagaacgtcagctttaaatccaacattcacacattagcatgggcaacactgaaatattaatgctatgaccacaggaatacagactacccattggtcttaacctctaacaccatttaagcaccctcattcataggcatctgaagggccagctcaaaggcagttgtggaacagacacagatgctatcaaccccatcccttgacttggacagacagccattttaaaggtatgtatcaccagtttgtggcagcagattgccccacgactacaactttatcttctgctcaagtggaacttacttcctttgcgccctgactgcatcatcatgcggcggcgaacagtgtcaaatggataggaagtcaacccggcaacagcagtgacagtctgtgcgatcatccagctgatgacgatgtgagtgttcttgggatccggaagcattcctgggaataggaaagagatgcttttaccaaaaagcagagttttactgacttcctttccccacatcccctaaacacgtcatctgtacacaagggttgcattggatgatcttggcttcctttagcaattaaaaaaacaactctttagctcttggactgttaggttggtacaatgctcttttaaactgtctcctaagaacacaacgttaaagcccacagcaaacttaccctttgcagtgtcatagataccgaagtaggcggctcggtagatgataataccctgcacagacacgttaaagccttggtacaggcccttaatcccatcagatttgtagatcttaaccaggcagtcaccgaggcctcggaattccctttcagctccagctttacccacatcagctgctagacgggtacgggcaaaatcaagagggtacacaaaacacagggatgtggcccctgcggcaccacccgatgccagattccctgcaaagtagagccaaaactgggttctcttgtccacaccacccaggaagatctgcttgtatttatctttgaaggcgaagttaagagcctgggtggggaagtatctgatgacattggccaggttaccgcgccagaaggacagaactccctgctccttgggaatacggaccacgcagtctataatgcctttgtattgcttatctgcagtgatctgcttgctggcatgctgcacctaacagacaggaaggaagccaacagggacagttataaccatggggaagggaaagagaagagcttatgccatctcgatcaatgccctttaaggtaggctcccctctctcaaatctagtcttcgtatatcatactggctggaccctcccaaccctctgaggctgtcacaggggaagaggtgatctgcaccagtagcattaagcctccacccctctgagtggagagggggcatcctccagcggacccgtgaccttcagacctaggagaaaggtcattacctcaaacccaggttcagaggcattagggcgagtcccacatagggcgcggtcaccttggggaccgcagcctacgcctcaagtctcctgagctgcttccgtctcgctccgcccccactccgctcccagaggtgacccgagcgccgccgccgccagccctacacgctagcccaggagcgccctctagagccggcactggagagcgcgcggcgcagggaggcaggcggagacgcggcggcagcggccgcggctgcgcgggggcggacgtaaaaggcacacgcgcttcccggcgccggcttccggcccggcgaggtttgagcgcgtccgcgggctgggaggccgctggacccgggcgcatggcctcccccgggcagttatctccttgccgcgaccttgaggtcttcggtaagaactggcgttcctctttctaacgccggctttcggccttcgcccttgacgcccaggcccggggaggccgtcactcagaaactgctccatccgagtccgccgcctcggagatgccgagagcctggtcctgccctctgcccccggccccttcctagactcactacttcaggtcactaaaggcgcctcccaccagtttgacttctgttctgcctctgcgccccgctctggcctctcctaagccgcttccctggccatgtctttagagttcgctccccgccacccctcgggcgcccgccttctgtgcgacccttccccccacttcctggttgggctcctggatcccaggacgtacctgcagcagcagcttgacccgctcgatgggcgctaccgccgtcttggagatggctgcggccactccacctgccaggaagtccttggcgaaggacacagcggcatctgtcatgttgaaagaggaggcagactgctgcaggacgggactgggccgggaaccggctttgactccggcgctgcggggcggagcgaagcaaatggccgatttatatagggggagccggagctggagcggcaggcgtcggaggcggggccggggcggggtctgggccccggcgcgctgggcggcagagccgctgagtggcccagctcgcaggaggaggagtcgtggagggcgggccgggactgctctccgcgccgcccgtgctcgccctcggcacctgacccggcgagaggaaggggcgggtccagagaacacccgggacttgaacgctggaccctgagagaggcctcggagaggggaggaagggtgaggtcacgatgtgcctggacaaaaacccttggagcaggaccaggactagggtgagacgcatttgctacagggatgccaaaagaacccttcagtcatcgagataaacagtagtcaatgcgatactttaaaaaagtcgtatgggcaaactacatcctactggccggcccccttgttttgtaaataaagtttaattggagtgtcaaggctgggtttagggtgaggcaagcgagacaaggtcatgcaagtgcaggttgggatcctgtctgtatttcaaatgttgatcatttgttcatcatggatttttgcattgcttctgatttttttaaaatagtacatgaaaaatcatttgtcttaattactgagttgtttttcaccaaggtgaatgcctcactcttcccactctagaccgtgtgctgtcctggagccagtgaaaccagacgaaattaagggaacagcagacgaaggaactgccaccgtgccccagaccctggtttgcaaatacagttcgacaaagatcttgccaggaattggcctgggagagtccaaaggactgg

SEQ ID NO: 203 - DNA, 6000 bp, Homo sapiens
gggactaagaactaaggagaaaagtgggagggggtcgggtacttgggcctgcctcacagatgacacaaggtagacacccccgtgtgaagccttggtcaagtcacagaccttctctgaacctgtttccttatcagaaccaaggctgatgatactaatacttccctctggggttcctgggaggatggactgcctgggaggcataataatagtaataataactccataacgaagactgatatttgtaggacttgatcacaagcattaggcattctcctgatgactccaaaggggagctcaaagggagggggcagcatggggtggggctggagaggccaatcagctgaggggtgtgtcttttctgcagcaatggaagagttggacggtgatgatgtgcgcgtgtcctctaggggacgctacgcagagcgggacatcgttcaggtagacctgacgtgggagaggctgtggagctgagaggcacagtgagaagaggctaagttgggagccactttcacttactgccttctcagtctcctacttttttcccccgtcactctttcatcctttctcattcattgaatacatcctttttgacaaacaggaaggttgctgcagccttggcacatccgtggtgtaggtcgggaggtccccaaggcccctgccctctagtggagacaaccaacaataaataatcacacaaagaaatatctcattagattgtgataagtactccagaggaatagcaaatgccactgtgagagcctgtaacagggacctaacataggtacagtagtcaggaaagggttctttagcttgccaagacctaagggaggggataagcattacagggagaggagcagcatgtgagaaggctctgaggcccagaagaactggcccgatccacgaaaaagcagaagctagggtagcaggatcacactgagtgtgaggagggaggcaaaatttgggggtatgttagaattggaaagctcttgaaggattttacatagaggagtgagatggcattttaaaaggatctctctagctgctgcatggtgggtggacagtaacagggcaagagaaaaggcaggtagactcattagtgaggaagcctttgaagtagtagaggggaggcgataaagatctggctagaagcagtggggagggagagaaagtggcaggttcaaaagatatttaagaagaaaattttacaagacttgatgattagatgatgacagggagtgaggagggcttcaaggatgactcagtattctagcttaagcaactgggtgagtgacatcccatttgctgggaaggggaaagctagaggaggagatttggcagaaagagctagaattcagttgtgaacacactgggttcgaagtatctgtgacaattgaatggagtggtaatatgggcaactaaatatgtggttctagaccttaaaaagaggtcagggatgggcccaagcatggcggctcatgcctataatcccaacactttggtaggccaaggcaggagggcctcttgagaccaggagtttgagaccagcctggacaacatagcaagacctgatctctgctacattaaaaaaataaaggccgggcgcggtggctcacgcttgtaatcccagcactttgggaggctgaggcgggcggattgcctgaggtcaggagttcgaaaccagcctgaccaacatggagaaaccccgtctctactaaaaatataaaattagccgggtgtggtggtgcatgtctgtaatcccagctacttgggaggctgaggcaggagaatcacttgaacccgggaggcagagattgcagtgagccgagatcgcaccattgctctccagcctgggcaacaagagtgaaactctgtctcaaaagaaaaaaataaaataaataaaaataaaacataattttttgaaaagaggtcatggatggatatatacatttggcagtcattagaaacagattttcttttgttttttttctcccttatcagcccctctccccccacatctcatttcttctcctctccctaagtccctctcctaggcctctctctcttcccagccccttctcacagactcctcctccttcttgccccagctccatctctctgacctcctcctgttctcaggatcccttctctctggtccctgccccttgtctcccctgctccctcctttccagtctccctccccacctcctggcctgctctacttccttccagggaacaatttttaaagtcatggaagtgtatgaaatcatccaggaagagagctgagagagagaagggaccaggtttagagagcagatagacccagaggaatggtggtgggaggggggagcttcaagaaaggtaagcaagaagccagaagagtgtggtatcaagagtgggacgtgtccagaagaattatggtcaaatgtaatggaaagctaaagagaagtcaagcaagatgaggactaaaaattactgttcactggactgatttagcaacacagggccactgacgacatcagcaaaagcagtttcaatggcctgtgtgaagccaaactggagtgggttgagggtgaataaaaggtggaaaaaaaagtgggtggagagaaagcaaatgtagaaaactgttcaagatgtggagagggagatactgtgatagttggaaagagatgctggggatcaaaaaagaagcctccctgctgcacccccatgccctctctcctggtcatggcttatctcttcttgtctgtgcctgacccagttcgtcccattccgagactatgttgaccggtcggggaaccaggtgttgagcatggcccgactggccaaggatgtgctggccgagatcccggagcagctgctgtcctatatgcgcaccagagacatccagcctcggcccccaccccctgccaaccccagcccgatcccagctccagagcagccctgaggattccacatatccaatgcctcacagtctgcaagcctgctcacccactgcttctgctttaagccagaggcacctggaaccctggacttcactgggagggccaacttggaggatcagtgctggctgacaagccctccgcctccttgcctgcagagggcctggcactatcaccacctctctgccttcatgccaataataaagctgatctttattccacctctgtctcatgcatgttggcgaaggaagactatgggacccaacgactggggccacatcaagagggagggaaccaggatggcttcagttagattcatccccatcctaacacgttcatccaatcacttcttcatacattcttcaaagaccttaataagtgaaactttgtatgtttttcctcaggagagaggcccatagttgttttttttcttttttccataaaatccgaatcctacacacgacccatagttctcagcagattctcaaacgaattcctgaccactaaaggagataacttagtataactctgctttgatccatctattctgaattattttaataaggataataacagctaatattttctttgaacattcactacatgtcaaaccgtgtgctaggtgatttacaagcatcatctcatttaattctcacaacaactctgagaacaggtactatatattattcccactttacccataaggaaactgaggctctgagaagatgagtcatttaagataattcatcagtttgacttcagatcccaagatcttaatcagcaaacctcttcctggcatgtcgattttattgggatggtttttagaaaacatacattttattgggtcaaatgcaaagtttgcattaagaagatagaagctttcagatgctttgggctttgtcccagaaccctggaagacctttcacgctcctctttgatgacaaaactggagaagtattgtttaaggatgtctccccctgccatgcaagttctctgaaaccctcaagaactaacaacagagttttcgagctctgttttacaaataaggaacttaaagaactgaacttgcccacgttcacattgctaggaggtgacccactcacattaaatcagctgttttggcaccatgttccaatcagcaacccgcagcacatccctgccaacccacagatttcccaccgctttaccagacaagccctttcacacccaccggccccaaaccagccccttctctcagacccataccttttctctagcacctctcctttacttttcccaagtttcttccctttccttcagtcacgccccgttatccctaatcggtcctgccctttccccacagctccgcccctgccttaccaagccccgcctgctcccttcagcgtcgcatcgctttttccaactttgttctttatttctagtccagctccactttccaggctcatccaaagctccgccctttctctcgcgagtactcttcttctgtttagccccactttttaccccgctattctaacaggcccccgctgtgcggtagccccgccccctcccacaagccccgccccacagaccggtctagtctccagccccgccccggtcctacccataactaccggtcccttaggctccagcccgcatccctcttgctcccggccctgcccccagccccgccccgtgactctggccccgcctcaccgccttcctccgagaccaaggccaggtccctcccgcagccgcggcgccagcaggaggcagggagcggatagggaggaggcagagggggaggggagaagggcgggctcctcacgcccagccccgcgctcaccgtccgtggttgcagattcgccacaaaccgcccgacgaccccagatcccgagtacggtgacttcagtctccagaaactccactctaagatgggagagctagagaagccctgtggggtgtccagggtcctttctgaatcccggagcacggtctttcgagcctcagcgggcgggcggggatccgtggcgaaagtgcagctcagtagcgccgcggcgccacgtttaccctgcgcagacgccgtcgccgccgctgctgccgccgccgctgccacagcctttgccgccacggtctccgccgccgctgtcctcgcgctgcctctgggagcctccattgttccagcagcgcccggtcccgagaccgggcatcttgggggctcgcgaaacgggcggcggccgacggagttgagaccccagggcgccggcgggaccaggagcggcaggggtcagctcaggaatcccggggagccgggaccaaagcgtggggcggcagggggccggggtggcgaggtctacggtctccggagttggggctcccccttcccggcccgactttccccgccgacctccccaagtggggtcggagccccggcgggcgcccccggcgatgagcccggactcgaggtggccggtgagtgcgggcctgggaccagggcgggagtggccggcagggaaggggtaggctacgttcgtgggacgcgcactgagccgcgtggcccgggaacctctctggcaactccagttgggagaactgacagtgcattgcttcccagcaggcatcctggggcaacagtgtatctttcggggctgcccgggctagtggcaggcggggagccttgtttcacttgttacacttccacaaaggggaaacgccgccgcatccggagagtgggctgcgggcactgccggggcccagccctatccctccggcccccgccccttacttcctccagccccctgagcttcaggggcagatgcagccgccattctccttgggccctccccacgggctttctggtctaagttctcgtctccctcgcctgtgcctctgctgccgggttccaaggggagattgctgattcgctgtgctactttgggaaccattcacccgggacccagcttggaaagaggagagcttgtttgtgcttcggttggtttatgtttaaagacacagccgcaggtaggaaatagaagagttgcagttggacgtgtagcgttactgatgtgaaaatcaggagccg

SEQ ID NO: 204 - DNA, 6000 bp, Homo sapiens
ctagtttccaaagcacgcttcagtctccccagaactcacctgacctgtcttatttcccactgcttctctacatatatgccaaaccagttttacacttgcctatgaacacaccttttttgtcttggtcatcatagttttactcacttggaaaaaaatccttttccccccttattaaaatcctacccatcactgaaatcaagctcagatttcaccactttttaaaagtcttctctatcagtatctacctgaataggtcactccaggactctggtccatcccctcatgggcatgacaacaagtggggtacatagttggctggggcaaaattaatgtgagtagagttaatttaggccaagcttgaagattgcaaccgaggagcacagattcaagttgccttgaatatacacactgattagcagccaccttcaagcaaacactgcctagggatgcttattctatggatgttgggaacttttattcaaatctctgtgaatatattactcctccaacttgccagtaaaccccttgaaacctatgacttgattgcatgcaataacccttaatactttagatatctcagaacctcccaagtttatgacgttcactacagcatgatttactccataaaatgtagtaaggtggccaggagcgatggctcatgcctgtaatcccagcactttgagaggccgaggtgggcagatcatttgaggtcaagagttcgagaccagcctggccaacatggtgaaaccctgtctctactaaaaatacaaaagttagccggatgatagtggtgcatgcctgtaatcccagctactcgtgaggctgaggcaggagaatcacttgatcctgggaggcggaggttgcagtgagtcgagatcgagccactgcactccaatctgggtgacagagtgagatcccatctcaaaacaaaacaaaaacaaacaaacaaaaaaacgttgtaaggttcaaattcaaaataagtcttttatatacgataatttttaaaaattgtcaacctcaatccatttaattacatcttagaaggaaatcaaatcaacaagcatttgtcaagctgatcatgtgcccagcattctggtaggtactgcagaaaataagatgatatagagtactcttgtgacagactgaatatagaaatggacaatgaccagaacatatataaaaatagaactctgacctacaacctctccaggaactagtccagaaagacaacagctatttctgcattaatcatcccaggacttgatcaactgccagtttccttagtttttgtcctgtttccaacttaggaccaaccagagaaagccaaatatgtatcctcaactgaccacataggatgccgtgcttccacttaacctgcctccagccagcaacatcaaatcagggcatacctgaagtctttccttttttcacattataaagctttcacactctcctgcctgccttccgatctctgaaaaacacaagtgatggtggctgactgctttgctacagcaagctttgaataaatatcctttgcttgtactcatttgagtgttctccatttatttctgctcttggaattacagaattattataggtggtttcaattattaatttatacccccaaagactcaagatatagtcatttataattttattagggctgggatttgaattatactatttgagactgatatatggcagttagtgactgccctgtacacacatatgattttgcttttgtattcacactgtgacacatgcaccttactggggaaattatattctctagagtgtattttgggggattattttggaaggcattgaacttaacaccttatgtatcttcagggcctgctattgagaaatttcaagagtgatcgactttgaagagtaaagaggaaattaataaaattaaaagattaagcctgtgggacttagaaaaatagtgctactctgttgacctaaaaggaagaagctgaagcaaaattaatataagtagagttaatttgggtcaagcttgaagattgcaacctaggagcatatattcaagttgccttgaatatacacaccattagcagccaccacaggtgaatctttattatttatttatttactttgagacagagtctcgctctgttgcccaggctggagtcaatggcaccatcccggctcactgccacctccacccccaggttcaagagattctcctgcctcagcctctgagtagctgcgattacaggtgcgtgccaccacacctggctaatttttgtatttttagtagagacagggtttcgccacgttggtcaggctggtcttgaactcttgacctcgtgatccgcctgcctcggcctcccaaaatgctgggattacaggcgtgagcgactgcgcctggcccacaagggaatctttaaaggcaaaaaagggaacaaggagtgggctgataccacgttgtgtacagaaattcttattggtttatggaaataacatttattagtgattggttacattgttaagctataggatgtgggttatactgtccaatgggacattaggttaatttatagctacttgtggcataagcaagtagtttcaagagatgaatacatagcacaagggagaagtaggatgtgattgttgtctccttttaatgtccctctgggcctgacagtttaaaataactacattcctcagataaaaataattttcttttctcactactaaatgacagaaatggagacttcagaaaggaattaagtatgaggaaaagatcaagagacagcaggatgttcaagttcattgaacaaacattgactgccagctagagaatagtaagcactattctagatgctgaggataatagtgaagaacaaaatagaccaaaatccttgctcttgtggaacttatctttgaaattatacagctgaagatttagccttgggtaacacagagaaataaggatgaaaaaaggaatgcctgagatgctcaggatggtgccaaagcacagaaacacactagggcctatgttacagcagtccagtggaatttcccttaaagaacccagggaaaagacattaatggaagttgaactatgttttgagactcgctgaagacagtctgccagaattactttatccgttacaagaatatccacagcttgtcctttaacagatggtctggaaacaggtggtaataatggtaacttaacaaagtactatcatttacaatattttaattcagaaacccatatttatagaagaaactaaggcacagtagagagtggaatgatcctcaggattacataacaagttgtagtcagataaagcattggtatccagctttcctgactcttagattctgagagagatttataatgctcttattttttaagactatacatcaaatatgtagcataaagaattcttaggcgtattatgggctgataccctaaagaatgctaatgaaataaaaaacaaactggtgccagactaatgtgattaatgtctgcaaccaaatttcccctaagtagtaataccaagtagttggttaaggatttatttatttatttatttattttgagacggagtctcgctctgttgcccaggctggagtgcagtggcgcgatctcggctcactgcaagctccgcctcccgggttcacgccattctcctgcctcagcctcccgagtagctgggactacaggcgcccgccaccacccccgcctaattttttgcatttttttaatagagacggggtttcaccgtgttagccaggatggtctccatctcctgacctcgtgatccacctgcctcggcctcccaaagtgctgggattacaggcatgagccaccgcgaccggcctggttggtttttttttttactctgcacaataggtttctgaatgacttattagaggtgtttgatgctgatagtttgaaactgattcgatcaattaaaaaatgttcattggtattgttttattagttgctagaatatgcattcaacttcactgaaacgagacttaaaaggtaagaggtacactacatcgcgactataggagtaagaaaatttaatttcttcacgccatctgaccaagatgttaaattactgaaccctttagtcttgtttttgttttgtagatagaaatcaagatgctggacaaacctttctcatggaatagtcaaaatatttaaggaacaaatctatacagtttaataactgccaacatttggcagggctcatgcctgtaattccagcacttcgggaggtcgaggcgggcggatcacttaagactaggagtacgagaccagcctggccaacatggcgaaaccctgtctctactaaaaaatataaaaattagccgggcattggtggcttgcgcctgtagtcccggctacactggaagctgaggctggagaatcgcttgagcccgggaagcagaggttgcagtgagctgtgattgtgccactgcactgcagcctgggtggcagagaaagaccctgtctcaaaacaaacgaacgaacaaaaaattgctgacgtctgtgaggttcttattatgtgccatgaattgatctacgtccttcacatatgtaaactcatgcaatcctagcatacacacaaaaaaccaatgtggcaggtactatcattatcgtagacaaggaaaccgaggaccagagaagttgaagtagcttggcctaggatgtaggttgtaactcctagagctgagatcttgtttatatacaaaaggtttcaagaatcaaaagtactctaagccactttgcgtttcggctgtcatcgagaaagggatatccgaagtttcaggttcgcagtttgtgaaacggaacggccagctttcgttctaaggcgggcggaggtttagccactccctcgtcctttgctctgccccagacacccacgctcgctttcctcttcttcctccacctcgccctacttcccttcttcctatcttctctcttctttcgcctcgccgccgcgagccctcgctcggcgaccagagcctcgcattacttcccctagctccgccaagcctcgctgcatacgcgaccgcgcgcagtccgccgtcgcgcccctatgacgtcacccgcgcgccaccgcttccgggctggggactgggggcggggccgcgcggagggcaagccgggggcggggccggggccagagcagatctccgggcctccgcggccatagctgactgtgccgtcccttcccctcacccgctccacgccctcctgggccgagtggagttgggtggtgtcgggagcctctccctgaggggcaccgcgtcttcaggagctgggcctccagtgcggcgcgatgtcaggcgcggtgacagctctgtgagtccgaggccgcggccgtggcgctgggcggctgcggggcctgaccggtccgctcatggtgccgccacgacgccatcgcggggcaggaaggccaggtaggcaggcagggaagggccccgacatcaccggagcccaaaccgggacggagtgcccaccagcagcaccacctcctgccctcggtggcagcaggagcgccttgaccgaaaccgtgaaggtctctaggggcggagggagcgggagctgacaggggcgccggagccctgcgcccaccgctggcaattgaggaagccgtgcgtgcgccctcgcctcggctccccggggaggcgtcgctgccttaactgtcttccccgctccaaaacagaaggatgatttcttttcccagctgtttcttttaaaatgactggatgttttgatagaggtgggtggaggagcatggagaatccttttcttttaccacttgaagagattggaaaggtgccttcaagacccacagcaaatcacttactctccgataaccaaattccactccagcagatcagggacagaaaagacacttttagaaacagtgtctagacgctgtccccagggatggattcctctggatggagaggtgaatggagttccgtatttgtgaaactcag

SEQ ID NO: 205 - DNA, 6000 bp, Homo sapiens
ttaactgaatacgtatatttttgtttttcagaactttgtacttggctctattgatgtgcctgtccatgtgccaaaaacaccgaattctgttgctcctgtaatactattcactttctttctagcacgtaggagactctggaggttactatgttcatttacttctttacctgcctattacccacctcctttgactaaaatgaaagctcaatgtgagccgtgaccttgtcccactcatgacttatccctaacattttaaatggtgactgatggaaagtgcttactcaatacttgttggccaaattactaaatgtaaatgtctggtaggttaaatcctttctagttgtcctttctctccaaaatgttggcaactctcacttgtttacttctgaaaaagtaaaacttaaagctgggcacagtggctcaggcctgtaatcccaacactttgggaggtcgaagcaggaggatcatgtaagcccaggagtttgagaccagcccgggcaacatagtgagactgccatctctaccaaaaaaaaaaaaatttttttttttaattagccagatgaggtggcatgtgcctgtagtcctggctactcgggaggctgaggtaggaggactgcttgagttcagaaggtcaaggttgcagtgagctgtgatgattgcaccactgcacttcagcctacctgggcaacagagcaagaccctgtctcaaaaaaaaaaaaaaaaaaaaatggaaaagaaagggaagggggaaagacaggaaggaaaaaaagagtatgtaagaatcattttaataggctgcaaaaattcctatcaacccctccaggaggtggagctacttataaggggggactgaatttagcaacccaattccaaagaacagtgtgttgaaatgaaaaggagcagctttatagcagagaaatctggcagaccctaccttatccaagtgattaacttttcttgttattaaaaccaccactcccggccttaacatccttttaaaatgagaaaatttaggccgggcatggtggctgatgcctgtaatcccaacacttcgggaggccgaggtgggtggatcacctgaggtcaggagttcgagaccaacctggccaacatggtgaaacgctgtctctactaaaaatacaaaaaattagccgggtgtggtggcgagcacctgtaaccccagctacttgggaagctgaggcaggagaaccgcttgaacccgggaggcggaggctacagtgagccgagattgtgtcactgtactccagcctgggcaagaaagcaagactctgtctcaaaaaaataaataaaataaaatgagaaaatttaagctacacaacttaacagtataggaaccatgcagatatcatgtactctgatgttgtgatgagacgggcacctcacctctgtggtagtcttccccaaaacataacctcagtgaaatcatgagacaaacccaaagtgattgtattctacaaaacacctgactagtattcttcaaactgtcaggaccatgaaaaacaaggaaaaacagaaatacgtcacaatgcagaggagactaagggaaaatgatgactaactatggcatcttgaatgggatcttggaatagaaaaaggctattggtacaaaacagacaaaatccaaataaagactgtagttttgtcaatagtttttttttttttttttgagagggagtctcgctctgttgcccaggctggagtgcagtggcacgatcttggcttactgcaagctccgtccctgggttcacgccattctcctgcctcagcctcccgagtagctgggaatataggcgcccaccactacgcccggctaattttttgtatatttagtagagacggggtttcaccatgttagccaggatggtctcgatttcctgacctcgtgatccacccacctcggcctcccaaagtgctgggattacaggcgtgagcaaccgcacccggccttgtcaatagttttgtaccaatgttagatgtttatttttgccaaacataccaggattaagcaaaatgttaacattaggggaaactgggtgtagggtctacagaaattctcccattgtctctgtaactttttctaaaactattcaaaaataaaaagtttttttaaagcctatcgaggccaggcatggtggctcacacctgtgatcctagcactttgggaggctgaagtggatggatcacttgaggtcaggaattcaagaccagcctggccaacatggtgaaaccccatcgctactgaaaatacaaaaattagctgagcatggtgccctgcctgtggtcccagctactagggaggctgaggcaggagaatagcttaaacccaggaggcagaggttgcagtgagccgataccgctccagtgcactccagcctgggtgacagagcaagactctgtctcaaaaaaaaaaaaaaaaaaaaagcctatcgagagtttgattgaaaatgtattaactgtatggattaatttgaggaatgtgacatctttacaatattaactcttcccactcagggacatatttggtttgtcttatatcctactataaagcaataaggtattcattatgtaagtcatttatgtaagggatgttgtccattatattttccatttgtttgctgctggagacatctatacacatatgcacagttttttaaaacaggccaccacttgagtttttctggtatacgtaatatatttataattattctttcaaatatttatcattgcctagctacaaaacctagaacaaataaggtatgctgtttgttttattaagaggttttaaaaatcaggaatggggccaggcactgtggctcatgcctgtaatcccagcactttgggaggccaaggccggtggatcacaaggtcaggagatccagaccatcctagccaacatggtgaaaccccgtctcaactaaaaatacaaaaattagctgggtatggtgacgcgtgtatgtaatcccagctactcgggaggctgaggcaggagaatgggaattggagagcatgccactgcactccagcttgggcgacagagcgagactctgtatcaaaaaaaaaaaaaaaaaaaaaaattaaaaaaaaagaaaagaaaagaaactggctgggtgcggtggcaggagaatcgcttgaatccgggaggcggaggtcacggtgagccgagatcgcgccattgcactccagcctgcgcaacaagagcgaaactctgtctcgaaaagaaaagaaatattttgtcccacattctgtactaagagcttcacacatattattttatttaattatcaaaacaactctaagggtagacaggtgtagatccaggttttgtggggactggaattaaacagcattaagggccttctgatttttaaaaaattacaaaattatgaacacaaaattaggtatgacgatggttatttagaatgagaaaataaattgtaaattataacaaatgaagagctctctggcatttaggagaaatgctccctggttgcaactccccacctgttagactacaaatcccagcgacccatgcaagtgaacataaatttcattagcttcaccgtaaagttgtctggcggcgggtcgggggtgggtaggaagaagtgttatctccatttttaggttgagcaaatcactcagtattgcagagtgggaatctgaaaattatgcaaatagactctagagccctcgcctttacccccaccctgcttcttgtcaatatcactgagtgtgcatgagggtctcgttaacgacggctgagggggagacgatgaagtaagaggaaaggctgaacaaagggcaagagaaaggcagaaagaagctcctaaagaaagctggacgcaattgggctccgcaaccctaatggagaaatgcgccttaggagggaaggggagaagtttaaggggaaacaggtaaaatgaggcagaagttgagcaagttagtcaaaccctaaattcttttacttatttacaaaacagcctggcgcggtggctctcgcctgtaattccagcactttaggaggccgaggcaggagaatcgcttgaggccaggagttcaagacccccctctctgcaaaaaacaatttaaaaattagccgggtgtggtggtgcgcagttgcggtctcagctactcgggagactgaggcgggaggatggcttgagaccgggaggcggagactgcagtgagctctgatcgcgccactgcactccagcctgggtgacagagccagaccgtctctaaaaataataatagcaataacaaaataaaaataaatgtactgcacccaactatgacccaggagtggcatgggtttccgcagcgcagcggccgcgcctgggcgccccaagcaacacaaccagcgctgtcaggaggcgaataggagccaggacagagagctggggaggccactgctgtcaggcgagggataagaaggccgtccgcggcgtcactgacggggctgaaggaacaccaggagaagagtggcagacagctccggagccgcgctgcccgggcgacgccggaagatgggcctcccagcggtcttcctttcagccaatggccgcgagatgcgccgtccgagggtgccccgcgcggcacagggagggaacaagcagcccatcgggtgcaagaaagcactatctttctaggtgactatgcgaactaccagggaagtgtagctagggacaggcttctctgcccgcggttaacctaactcagtgccaccacgcctttaacctgaagccagggagcacggctgccctcagtaaagatggctgactggcgcggagaaaaagccggaagcagctgggctttgcagggagccgactgagcgctgcgggggcgtggcctggcggtggaggggcgtggccagccgccgtaacctgggtttgcgatctttgaggcgcgcgcaccgcacccggtcccgactctgtggcttcctgggggcgggttcgccgtcggccccgcccccgcccaggtgtctccctttgggaagctgcccgccgagtctccgagatttgtccctggtggtcccgcggacccctcgtccctccgcagtctccggctggcagcgatggagggcgctggggagaacgccccggagtccagctcctctgcccctgggtccgaagagtctgccagggatccacaggtgccgcctccggaggaagaatcgggggactgcgcccggtccctggaggcggtccccaagaaactctgtgggtatttaagtaagttcggcggcaaagggcccatccggggctggaaatcccgctggttcttctacgacgaaaggaaatgtcagctgtattactcgcggaccgctcaggatgccaatcccttggacagcatcgacctctccagtgcagtgtttgactgtaaggcggacgctgaggaggggatcttcgaaatcaagactcccagccgggttattaccctgaaggtaaattcctgcaacgactttctcctttccagcggcgtgaggtccccttttcgcagggcaaggctgggcgcgagtgtgaggtggacacagtaaatttggagtgtcggtgacgacagttccaagaactttgtgctttgcaaagtgcattcccacccatttcctcattgggttcccacaaggcagggaagacagacccattttacggatcaagaaactgagtcagagggagatgaaaggactggctcgaggtccatgcgtctagagagtagggtagcttggaatcccatagtctttctacctctcagtgctgaatcaaaacttttacttttgggtgtgcctgacagtgcagttaccttaactttcttacctgggacctaagtaagtcaaaatatggtctttgcaatcctctctcaaggccaggattctgattcccgtttcttgatattttggccaaggtcagtgaatgctgagaagagactggcagggattaggaaaataaacacttaggtttcactgatcagcctagattgttcatctag

SEQ ID NO: 206 - DNA, 6000 bp, Homo sapiens
cacagtaaagtttccctctctctcaggtctggaaacctggagggatgggtgcggcaggagatggggaactcccgccaaggaactccgtgagagctcagagcccaaccacctgcttctcgcccgtgggaggggacacacaccccctcttctgagagcagacaggaggctgcgaccatctcgtccagctttatgcttggagcaaagcttgaaaaagcctcggctgccgcccggatggctgatggtggtggcggtgagggggtctctttcctctctagttcttgctcccccaccccctcccccggctgctgacgggcaacagaaagtgaggaagtttgcaaataaggggagttgtcctaacatagccatcacactcacgcgtccataccttgagggctcggccgtggtcctcgggaggcttccaaaaaagctgcttcccaacaaacctctcccagccaagccctaactgtggaacccacggcttaggaggaggacacggcgaagagggaaggattagcaaacgcgacagagtcttcccaggaaatccaagttctatcagtccctttggacctttccacgggctgtttctttgaaaatacatcaacaaataaacaccgtccacagagagatcccaacagccgtggggagaactgaggcagggtaggaagtggagagcacgcaggaggccaagaaggcgaggggcaagttctaggcaagcggattatgttacacttcctcctattaccagacttccaggaggagacacctcgatttgtgcataaaatgcataccctgaagtggataagactctgaaagcagcgtttgaggaggttaaccttgactggttggagttaagggggggtggggggaagcaaatatttctgtttgtgccctccggctcttcccagcaccggctgtcaatcccgacgcttgttatcctcacaaggcttcagtttgtttgcctgatctcagcaaggttttcttccacaagtagaactataattgctataattctactgtatcatttggatcattgcagtattgttgttttctctctctctttctctcctcctaacactgcaataacgcgctccagtgttaaattagcaggttgcggaagaccataaatgaatgaaagtttgtttaaaaaaaaaaaagaaattaaataaataaaacagcaaaatgacttggcaaaagggatatcacatcacagagaatccttgcgtgtaatcaggtcttattgtcttctcttccagtggcttccaaattggtcgctagattccaatgaagtttatttctattgtttaaatatatgttttgaagaggctgatcgtaatttaaggggacctgagccgtccggtgcaactggaagcccatcacagcttgatttatctatgtgtatattgcacaataaattaaaacatctcaaatgaaaagtatgtgaggttaactctcttccaaacattttttttttctggataatgacatctaactgccacccccccttattccacatttcttgcaaatgtaattttaaaactataatgtagaattagctctcagaaaagaaaggggtttctccttccactctcctcttctaggtaaattattatttccagttctaggaacaagccccatttttcaccataaacaacagttctaaacacatgtgaccttcacttccagccattattgtcatttttatttagtgattgattttaaaagcagataaactgcaaaccattgttttccaagcagaccaggaaaagcaaaccaacagctacagaccccaaagattagaggagccaggacttgtgaataacaaagtacaaacaagaatgatattatcactaaaatgcaattacttttgattagtgagtaaaagtgaggcaaaaagaaagtgaagtgtcgttttcctggcaaagtaaaattaaattgggctaaactgtaagttctttcatacgtaatcctatagcccaattcttaaaagtctgcccactcaacacatcagttaccctcttcctagatattagacgcataattttgtttctaaaatgatatatagaataacatattttatatatatatatatatatatataatcccatatcctgattaggcattgtggagaccacagcacagtcttatgtctctctacccagcaccttagaaaagttttctgtaattttttaaatttaatctcttagaaatagcaaaagttaattgtagatttttgaagttgggtattggattgtgacaaaggtggtctcagggccactgggtgtagagtgagctaggtcaggcccttctccccgaggtgaatggacgtgtttcccaatagcatcctcacttgggaagattgattagaaaataacaaaaataaataaaataacagaacaaataaaactagtgttttcacacaggtctcccccgaaaacactttatattccattaatagaattagatctaattccagggatcattaagtcagaatcagaaattctttgttaacctccccttttacagtggatgattaaaattagaatacaccccagcagaaagtccgacttcttttaaaagaagaacagctgcacaagggggaggaggggggatggaggcaaagaagtcttccacccagagagctgaaactccgttgggctctcagaaatgatttgtgcatttgtgtttttgtttaacacgatctttcttggactcattttcagcccactccctgcgtgtgcggagccgactctgaagtcactgagccacccggcagccgggtcttgtggatttccaacgcggggcccgccggggagggaaaagtgcctccgtctctcccaaccaccaagccgcagggacgcccgcgagggtccgcggctggaggctaggaggaaaccgaagtgtctttactcctcttggctgcgatgagacccgcgcgcctggaatgggctttcggggccgggggagggaatgtgggaggaaatcagcgcgcagaatgttagtttaaagctgaaccggacggtgtaaaaacaccgaactcttggtggggatggaaaaggaagaatgcgggaaaggcaaggagagatcccaggtgactttgaatcgcagagagggcttaaaggaaaatcaaatgtcagcgatggctcgggttctcctccgctccccaccacagcccgccctatcatccaagtgcagaaaaaaacggatgagaattaagctaaaagccagagagagagagagagagggacagaggaattctttttgtcctgtctttaatagtagtagtagtatcagtattagtattcgcattattaatgtgcctgttcccaacccttcatcccctccccccagttttgtcttgaagtttcctgcggaggcagcccgatctgtctgctacccacccaccagcatccaagagttatgcagatgtttatggctgaaaaaaaaaaatcccagttatgcatccttgtatttttaaatactgactgtaagtgattcaagtataatcctttgtaaaatgcttttctctttgacacattgaagggagttgagagaggaaaacccggcgtggattccccctccctggcccctctctcacccaccaccttcgccccaattctgccagcgttggggcccctggaaatccctgggaacctgcacccaggcagggaaggcgtccgtgctggcccaggctcgacccaacatcagttggagttgggttttagttctcggcgctggaaactgtttgggaagaaaggcgctctctctaaggttcactctctcacctttgctcaagggagccaggtcatgagaattcagaattttagacgcttagatttggctgcagccgaatttgggttccttccaccctggagaggtcagggatccctgagggttctgctccctagctgcgattggaaggtgaacagcctcagggtgaaggcctaacagatacgaatttgtgggggaaagagggaagagagtccagggagaaagaggaggcccccagactcgtccccagtcgcccctcctcgctgctgatactcgcctgtcccttcccacccagtaaatgctctagggaaggccgcgcgcctatggcagagctttgtctgtaaggaggctttttcccattccagagtttaaaacggagaggagagcggttgggggacgctacaaacaagagagacacagtcgggctcagggtgaagatagacagcgcaatgccttgggccgcaagagaaaagcgaactcccagacggcagatgtttgcttggggcggtcaccctggccccccgacgcccgtccggcctagagaggacggcaattgagcgccagggaggtcaaggcggtgtcctgggagcccaatatcggctttgaaaagtgccgagtgagtctgaacgtgagcctcgaggcctcgcctccagggagcgaggtcctcgggttggtggaaggggcgcacgccacccagatggcattcacaggcctggcatcccaataagctagaacttcggccaacactaaagggtcaaaggaggagctgcaggaagaggatagcggacttagaaaattggtaacttaaaaaaagaaagaaagaaaaggaaaattggctctggtgcgtgcccgctgcccccacccccgcctgcccctctggaatccagtccgggctttgcgccgcgcccacaggccgacgcagcccggcctctggcgagagccaatcagagggcgcctctcagcacgtggaggagagagactccagagctcagcgcccgctgctcactacacttgttaccgcttgtcctgagcgcggagagggcgagctcgggccgcgggcagggcgggagccggcagccggcaaccaagggaggcagaaaggcacaaagatcgcaataatatccgttataacccgctatctaaccccacccccaacacacacccatccatcccaccctccgggagaggcagccggcgatccgctctctgcgccctgggaaaaagccccagccatgagcaatcagtaccaggaggagggctgctccgagaggcccgagtgcaaaagtaaatctccaactttgctctcctcctactgcatcgacagcatcctgggccggaggagcccgtgcaaaatgcggttgctgggagccgcgcagagcttgcctgctccgctgaccagccgcgccgacccggaaaaggccgtgcaaggtaaggatgctcccgtcaggcacttactaagggcattgggccctgatttggatgtttggtgttcgggggccagtggcctggaattgtcaatttggagaggaaggaaggagagggcataactctgaggcctgctgcctcaaagagcgttaaacatctagccagggctgtctctccctccctccctccctgcttccagaaaaaggcccgttttcgcttagggagcctttagcttttcggtgttgatcgttaggttgtttaaatgccccttttggtggccttgggtgtgctctgaagagcggcgacaggtcagaaacagtagatggccggtggacccttgtagcaccaacttgatgaagacaagaagcccaaaagctggtgaatcggggtctccaggctgagtgagccttggcctttcctctttggaagatttctgtatatgcaatgttttggttttatttttttaattgcagattacttgtgaccttttaaacccaagctttgcagaaaacatcttcctgggattctccaaatgctccttaatgtatttaaaatgtatgaaatgtgtgacttctggatgctaattttttctctgctattttattttttaaaatagacgagctgtttaaaatattttatttttttctgaaattaaaaattccagaacaaatgtccttttaccccgaacctgttatcctcaagtttcgcctcgagcttgctgcagaggtgtcgcagggaaaggaaagaactgttggtttcttttaaaatccaaaaaccagcggtccggccatagcgcaatttggatgg

SEQ ID NO: 207 - DNA, 6000 bp, Homo sapiens
attttacaggctcataggcggaagggactgccttgtctcagatgagactttggactagacttttgggttaatgctgaaattaattaagactttggggaactgttgggaaggcataattgactttgaaatgtgaggacataagatttggaggtgccaggggtggaatgatatggtttatctgtgtccccgttcacctctcaactgaatcgtgtctcccagaattttgatgtgttgtgggaaggacctaaggggaggtaattgaatcatggaggctggtctttcccatgctattctcatgatagtgaataagtctcacaagatctgatgggtttatcaggggtttctgcttttgcttcttcctcattttctcttgttgccaccatgtaagtgccctttcacctctcgccatgattctgaggcctccccagccatatggaactgtaagtgcaattaaacctctttttgttcccagtttcgagtatgtctttatcagcagcgtgaaaatgaactaatatactacctcagatgtcctgggcttgtaggataggtaggtggaaaatgcagcccaaactggtatgttcctcaattccaggtaccccagaaactatgcccagagaggagacagtggcacagaacaagccaatggaggaatcgtggactgctttccctattctgggcagagttgggtgtacctcatgggcaggccagactctgctgtactctgaaacccctgggcagaggggttcccaaggcctctaagagtaggcccggatttttcttcaagcacaatcaatacttttctagtaacaggctctgttaacataaacttttccaatcccacaggcctggctccccatcttggccctgcaacttctgaagggctttgggtctttttgtaaaaggaggtaaacagaatcattgggctgttgtgagaactagaggtaatggcatataagtcacataacaagcatttaataaattacaccttattggtcttgtaaaagatatccagattcttcaagtttttaagaaaatatccttcattcaataatgtctttgagctgctccccaaccagggtttcctggttctagcccagcaactcaggattgtttctcagaagaaataaagactgagaaatcagctagctgtttctcgtctctgggaatttccactctggagccttttacctttacccccaattcattatttcaacaatcatttattgcaaactctctgttcaaaacactgctgcagcagctggggttggtggttcatgtctataatcccagcaacttgggaggctgaagcaggaggattgcttgagaccagaagtttgaggctgcagtgagttatgatcatgccactgcactccagcctgggtgacagaatgaaactctgtcttaaaaaaaaagacaaaaaacaaacaaacaacactgctgtagaagaaaatataaatatgaagtctttgtcttcaggaagctttcagtaaagggtagcaaacaagaaagcagtgctcactaggtagaatccttgtatcataattcgcttggtaatcagcctttatcactttgcagactggttaacctcatcagtaggttgttccctactgtctcttaactactttctctcacatatttgcttagcacctaaaaactgcatctatcctacaaaccccaaagatgaaacagtccttctttacattaacataaagatgcagaaagaaattacacaataggacctagatgtccctatcttaagtccattttggctgctgtaacaaaatgctgtaacaaaatacttgaaaaggccaggtgtggtggctcacgcctgtaatcccagcactttgagaggccaaggtgggtgcatcgcctgaggtcaggagttcgagaccagcctggccaacatggcaaaaccccatctctattaaaaatataaaaataagctgggtgtggtggcgtgcgcctgtagtcccagctactcaggaggctgaggcagaagaattgcttgaacctgggaggcggaggttgcagtgagccaagatcatgccagtgcactccagcttgggcgacagagtgagactctgtctcaaacaacaacaacaacgataaaaatactcaaaaaagaagaagaagaaaggaagaggaagaagaagaagaaagaagcaagaaggaggaaggaggaggagcaggagaaaggctaggttcagttgctcatgcctgtaatcccagcactttggaaggccaaggttggagaattgcttgagcccaggaatttgagaccagcctgggcaacatagtgggaccctgtgtctataaaaaaattttaaaatattagccgggtgtggtggcatgtagccatagtcccagctcctttagaggctgaggtagcaggatcgcttgagcccaggacatggatcatggctgcagtgagctgtgatcatgccactgcactccagcctggaataaaaccctgtctcaaaaaaaaaaaaaaaaaaaaacaacaaaaatacaacaacttagactgggtaatttataaacagtagaattgtattgctcacagttctggaggctgggatatccaagatcaaggctccagcagagtcacagtctgctaagggcttgttctctgcttcaaacatggtgccttctcagagcatccacacatggcagaaggatcaaacaggctccctcaagcctctttcacaagggcaccaatttcccccacaaaggatccatcctgttaatatgaatgtgttgggtcttaggtttcaacatatgaattttggggagataccagcatccaaaccatagcagcccccaaatatgctgggccctcaaaaccctccaaaatcccttcacttatctctattctatgactgggcctactctccacagggaccattcactgctcctcacatggcccactcaacaacttttctcgctctctgtaggcaacactgtctcctccttaaattgaaaatcaaggccacctaagacactacccaggcctgctcttcattcattcattcatttaataaatatttaccagagctaacatgggcctgcacggtacagatgtgagacatacaagaatgagagccaagcggccatggtctctgccttcatggatctcagtctactgttaagttacacattaagcaaaaattacacaaattattgcacaccctgaaaggggctaggaagaagaatccctggtgctgcaatttttgtgttttttttgtttttgtttttgagacgaagtatcactctgtggctcaggctgcagtacagtgaggcgatctcagttcgctgcaactgccacctcccaaggtcaagtgattctcctgcctcagcctcctgagtagctgggattacagacgcatgccaccacgcccggctaatttttgtatttttagtagagctagggtttcaccacgttggccaggctggtctcaaacttctgacctcaggcaatccgcacctggcctcccagagtgctgggattacaggtgtaagccactgtgcccggctgtttttttttttttttttttttgagacagagtcttgctcttcgcccaggctggagtgcagtggctcaatctcagctcactccaacctccacctcccaggttgaagcgattctcctgcctcagcctcccaagtagttgggactacaggcatgcaccaccacgcccctctaagttttatattttcagtagtgacggggttttgccatgcctgcctcagcatcccaaagtgctgggattacaggcgtgagccactgagcccggctgtttctttttgtgtgtgttttttttaatgaaacagggtctcgctctgttgcccaggctggagtgtagtggtgcaatcacagctctctgcagcctctacctcccttcagggcccaagcaattctcccacctcagcgtcccaagtagctaggattacaggcctgagccgctaattattttcttttcttctttctcattctctctctctctttttttttttttttaccatgttgcccaggctggtcttgaactcctggactcaagagatccgccactctgcctcccaaaatgccgtgattacaggtatgagccaccacacccagcaatgctgcaagtcttatgggccaggatagtgtaatctaagaaatgatatatgaagaactctcacaatagggaagaggtgaggagtgtccaggcagagagaagagcatttgcagaggccctgggcgagaagaaacctgcatcctttaaggacctaaatgaagccaagcaggcagaggctagatcacacatgggggcttcatgcccaccttaagtagtttgggtctttaaaaaaggaatgagactcataaagaggttttaaggagcgaatgctattgctgccatgaacagatattccttccccatagctgcagagcaggcacagggctgtttttgcccgccagtatgtccccaccgtctagcccagagcggggccagcggccggctcctacccacacttgctggcaggaagactggacgcactgcgggacatggtgatgtcctgggttggggctgaggaaggcctatgcgcggagggtgcggccttcggctaaggcagaggaccagggttgggtccgtggcggcgggaggggtggcctcctgcgctggtcgccccaggggacctgagaggcgcgacaaacagtcggcgcgtttggtactcgcgcctgcagagctttcaacctccgcgccggctgcgcctgtttctcggccaggggagcaaggccacgcggcctacgcagccgagtcggaaccaaccggttgtttggtgaaacctaccccagagcctcccgcggcccacagagcacaggtgaggcagcagaccgggtggggtcggtgtcgcgcctgcgcccgcccggacgcctcgggcccgcccgctccgcaccctggaaacccctgcactcagccccccggcgtccccacgctctcggccctgctgcgccggcggcggccatctctgggcggcggcggcgggcggtgtttgcgcggtcggtgagacccgcgcgggtgagacgctgggtgagttccggacgcttccagccggcccgccggtgatcccagacctcggggcgggacgcggctcccgctcaccgccggcaaaggtggaggtgcggcggggcgcggggcgcggggccagcccggggcggtgcgggggcgtccctgcctagcgaggccctgccccgcgacctgccgcaccctcctccggcctgttcgcgacctctaaagataatacttctcactgtcgaaaacgtggaacagaaagcaaggaagcaagcaaagcagccgtgccgctgctccccagagacaagctgcgttaacatgagggtgtatattcttccagatggtttttccttgtaacatgagcggggcttgtttttgcagaacctgcatcataaagtgctgaaactctctctctctctctctctctctctctctctctctctctctcgactctctctctctcgactctctctctctctctctcgactctctctctctctctctctctctctcgactgtacattcctgtgtgtcaggttgactacctcatccatccctgactcttggcatggctttggactgtgatttactaaatgtagtttctccctgatggtgagcgtacaagtggttttcagtttttagttattgcaaaaagtaattcattgagcatcgttgtatctgggtttttgagcgtgatcatttctgtagaaagaatcgcacaagattcgttctaaaacaagatagaatccacggtctataccacaaggcttctggtatagattgtgaaatggccctcagaaaagttattctcctttttgtacctccagtaagtagcatttgggaatacttggctcgaggagcttcctgagtgattttactggagacccccctcacttcataaggggccggcccggagatgaagatgtcaacacttgagtgtgacttgcat

SEQ ID NO: 208 - DNA, 6000 bp, Homo sapiens
aaattatgctatatattgcagtttgtttttagaaattaaaaaaatacatttttaaatatataaaaatatttaaatatatataaaaattgtgtgggctgggtgcggtgactcatgcctgtaatcctagcactttgggaggccaagggggggtggatcatttgaggtcaggagtttgagaccagcctgaccaacatggtgaaacctcgtttctactaaaaatacaaaattagccgagcgtggtagcacacgcctgtagtcccagctactcaggaggctgaagcaggagaatcacttgaacccaggaggcagaggttgcagtgagccgagatcgcgccattgcactccagcctgggcaacacagtgaaagtctgtctcaaaataataataataataataataataataataataataatgtgaccattatcttaaaatttttggaaaaatacagttaaaccaaaagaaaaaaagcagccccagatcccatcattccagaaataaccactattaacactaaacactggccaggcacagtgcctcacacctgtaatcccagcactttggaaggctgaggcaggcggatcacctaggtcgagagttcgagaccagcctggccagcatggcaaaaccccatctctactaaaaatacaaaaaaattagctgggcgtggtggcccgcgcctgtagtcccagctactcggcaggctgaggcaggagaatcacttgaacccaggaggcggagcttgcagtgagccgagattgaaccgttgcactccagcctgggtgacagagcgagactttatctcaataaaaaacaaaaaaccaaaaacactaatcaccgtgataggcaaaaggcatttccttatttatttttttgcatcttttaaaatattgtgatatggtgtcatatttgaaagtgataaagcataaaaatatcatgaacctcttgaactcagtccccacttaaagaccagttactgtaacttgcatacctctttgattcctcccccattgttcttgacttttgcttttatttttatttatttatttttgagatggagtctcgcactgtcaccaggctggagtgcagcggcacgatctcggtcactgcaacctccacatcctagggtccagcgattctcctgcctcaacctccagggtagctaggactacaggcatgcaccaccacacctggctaattttgtatttttttagtagagactgggcttcaccatgttggtctggcttgtctcaaactcctgacctcaggtgatccgcctgccttggcctcccaaagtgctgggattacagggctgagccaccgcacccggtctatttttattttattttattttattttatttttttgagacggagtctctctctgtcgcccaggctggagtgcagtggcacgatctgggctcactgcaacctctgcctcccgcctctcaggttcaagcgattctcctgccttagctttccaagtagctgggattaagtagcgtgttccaagtaagcatgtgccaccacgcctggctaatttatttgtatttttagtagagacggggtttcaccatgttagccaggctggtctcgaactcctgacctcaagtgatccgcctgcctcccctcccaaagtgctgggattacaggcatgagccaccgcgcccggcccctattgtgtagtttttacttatcttccaatacctctttttcactccttgtgtctctaagattcatccatgtaattgtagatcattgattttaccctgttacatattattccacagtgtgaaccttccattgtataaaacaattccattctcttgttgatggatatttggggtttttccccatagcgatgctgctatgaacctccttgggcacatctgcaagaatttctccagggcatgtgtactcagctgtggaatgcaaatgtttacaactttgtttccaagacagtttttttttttttttttttttttttttttgatagggagtttagcccttgttgcccaggctggaggctggagtgcaatggcatgatctcggctcactgcaatctctgcctcctgggttcaagtgattctcctgcctcagcctcccaagtagctgggattacatgtgcccgccacaacgcctcgctaatttgtgtatttttagtagagactggaggcggggtggggtggggggttgggggagggggtttcaccatgtggaccaggctggtctctaactcctgacctctggtgatccacccacctcagcctcccaaagtgctgggattacagccactgggcctggctggcagttctttaacttgctttcttcacgtaaatatcctataaatatcctggccatcctttcctgccaagacatactgacctgcatccttcttttttttttttttttttttttttttgagacggagtttcgctcttgttgcccaggctggagtgcaatggcgtgatctcggctcaccgcaacctctgcctcccaggttcaagcgattctcctgcctcagcctcccgagtagctgggattacaggcatgtgccaccacgccaggctaattttgtatctttagtagagacggggtttctccatgttggcctggctggtctcaaactcctgacctcaggtgatgcacctgcctcgacctcccaaagtgttgagattacaggcgtgagcgaaccaccgcgcctggcccgcatccttcattttaacagcctcctcgtgcacttcggcaggctgtgccttaacttaagcagtcccctagcaatggctacttaagttatttttccctatcacgtagagtgatgtcatggatgccctggtaattacaagaaggaacatcttaagttttcccagctctgtgaagttattcttctccctattttccagaggcagggagaagggaagttatgcgctaaggctgcgcagctggcgaatggcagaggttaacttgaatctgagggtgaaccctaagtttgcccaggtgactacagggtgcaaggcagggagctggaggccctctgtggggagcccaggtagaaactccactgagtgcaagcacagcgtgctccggaactcagtttccccatccggggtcatggtggcaataaagagagctagaagtgggcccgatccacactgcagggagccgaaaggctgttgtattttggtggtcaccccgggctgcccagtggggtgaccgaggcgctcaccaggcggcggcacccgggtccgcctcccctttcccttccccgcccgcgccgcccgtgggcggagccacccgcggccccgaggctccgcccacctcccaggcctgggccgggccgtgacggcggcgctaggacccggcgggccgcgggtgcggcgaggcctgggcggcctgaggagcgcggaccccggcgctcggctcccggcgccatgtgagggggctcgggggccgcggggggccgggcgctccccgccggaggtgagcaggcgccgcgcgggagcaggccgcgggggcgggggcggaggcgggggctggggcggagggcgccgggagaggagattgctaatcgccggggatggggatggatgcgggtcccccggcggcacccctagaccccttcccccttggtagccgcgccccgaggttccggtcctcgcgcccagggtctgtcgcggggtccgctgggcctcttgccgccgactaccccgtcagcggtcctgcctctcttttcttcccagctggggttagggctccggacccccggagtgcaggagttggggagggggatgaggcgaggcgcgcgctgggtgagccccccaccaggtggacgcacgggctcagcgtcccgcatcgtcttggatttaggagcccccctcccccttctccctggagccctcctcccacgcgggttcgtgggggcgtcccgatctgcgggaggactcccggggctggaagaaggaaagcccccaaacagagggcagggtgtggcccccaccctcggctcccgctcagctcgcctgcacgtccagccttgggctgagtccatgctcctggcccagcgctcggggctgccgcctccccagcgtgagcaagccgctccccaacaggccggcacccctagacccccgccctggtgcctgtgccgagccacgtcctgggcacacactccatggcctctgacccgttccagccgagagggatcctccagggagacgaagtcaggctcagccctgggcagctccctgtaaacaaggctctggagccggctctgggcggccccgcaaggcgctttgcctctctgaacctcagtctccttatctgtaaaatgggcaacaagagctcctaccatgcattgcctggattcagtgcgtgggtgatgcttagaacgcattcccacacattccttgatattccgggaaagtcgctgcactggggtcaggggaggagtgtttcactgacacactggagaggcgggccttgaacagtgattaaccacaagactaacagctgttggcattgtgggagcactttcttttctttctttctttcttttattttattttatttatttatttttgtttttgtttttgagacggagtctcgctctgtcgccaggctggagtgcagtggcaccatctcggttcactgcaacctccgcctcccgggttcaagcgattctcctgcctcagcctccggagtagctgggacaacaggcgcacgccaccacgcccagctaatttttgtatttttagtagagacggggtttcaccatattggccaggctggtctggatctcttcacctagtgatctgcccacctcggcctcccaaagggctgggattacagacgtgagccaccgcgcccggccaatgtgggagcactttcaagccccgcgtgtcccttgccacatctgcttgaatccttccaacaaccccttgagttaccgactcttattgttcccatttcacagatgaggaaactgaggctcagagaggtcacatggcttgctcgaggccccccagccagtaagtggtgaaaccgggattcgcactggcagctgacatgctgtactgaccatggccttctcagagcaggattgtgacggggcggaccagggggacggtggtcctggctgagggcacagctcgggcaaaggtgggaaagtgggcggcgggcagggggcatccgcaggaaagggtggccacgcgtagtaagatataggcggctggacccctgggcgccttgaatgccaaggtctcagggcagatggggccaccccaggattctggactcctgtcttttgctctaacggtctgtgagggcaagaacaagccgctccctgcttctgatgaggccccgttttctgctctgtaccgcagggcctggactagataggagtctgggcctccctgactggcagtgaggggcagccgctggagaaacccgaagccgagctccggatgaggggcgctcccacggggagggggcggggttggagagggggcggggccatgatctaaccaatcaggagcgaggtgtgtgtgccaagcctcctctggcccgaggttctctggctattcctggtggccgtgtaggagtaaacagcggctaggtcaaagggctcagagaatacaggaactgagaggcccctggagcaggggacggagctgaggagggccccctaagccccagtttcttccctctgcactcctgcccgccctgcccccggcctgtctgctggaggtaggctggacacagtacattttccctttcacaggtggggaaccctggaaaggagctgggttttggttgtgggagaggaagagattggggtgtgcggagcagagctgggccggcctcctcactgccaggtcttccaaaggcccccccagccaccccctgagactgtgattacagccatttgacagatgaggagtcagccctggcagagactgtcgagcctggactagaaccgagcctctcagacttgagtctgtgc

SEQ ID NO: 209 - DNA, 6000 bp, Homo sapiens
cagcagccagccaaagagccagggggcgtgggcgccctcggcccctggttgaccccacactcccctctccacagtacggctgggtgggccggtggttccggccacggaaggggacactgggggccatggacctggggggtgcctctacccagatcacttttgagacaaccagtccagctgaggacagagccagcgaggtccagctgcatctctacggccagcactaccgagtctacacccacagcttcctctgctatggccgtgaccaggtcctccagaggctgctggccagcgccctccaggtgcccctccaccctggctcacctgcactgcactgttccctcctggagcagagcctggacagccactgtgctgtggaaggcttctccaggctgggctttaattggctggaaagacaggtgggagggtcagagcatgagcaaaggcccagtggctgggctgggcctggagaagggagggccagggacggctctcagagggagcctggtcaggggcgttgggatctgtcaagcaggcagtggggagccatggattgcccctgagcacaaaagtgaagttgccagagtgagacctgtgggaggtttgtcaggctggtcctctggagcggtggtggtgccaccctgtcacgctggtgattcccccagacccacggcttccacccctgctggccgaggggcttttccacccaagtgctgctcggggatgtgtaccagtcaccatgcaccatggcccagcggccccagaacttcaacagcagtgccagggtcagcctgtcagggagcagtgacccccacctctgccgagatctggtttctgggctcttcagcttctcctcctgccccttctcccgatgctctttcaatggggtcttccagcccccagtggctgggaactttgtggtgagtaggggcaggcgggtggctgggaactttgtcgtgggtagggacaggcgggtggctgggaactttgtcgtgggtagggacaggcgggtggctgggaactttgtcgtgggtagggacaggcgggtggctgggaactttgtcgtgagtagggataggcgggtggctgggaactttgtcgtgggtaagggcaggcgggtggctgggaactttgtcgtgagtagggacaggcgggtggcagcaggtgctctgagccgctggggttcggtcacagtgtgactgcgccccctacaggccttctctgccttcttctacactgtggactttttgcggacttcgatggggctgcccgtggccaccctgcagcagctggaggcagccgcagtgaatgtctgcaaccagacctgggctcaggtgagccccgctcccactccttcagggctgtgcggaagggctcagcctccgcctccgcatgcctccccagccctgcatggacaggcctctcggagcacccgctgcagtgggggcgatggcaggcattaggctgactccagaggtggcgtggctgtggccggtaggctgtgaacaagtcgggcgggttggagaagcttcgccaggcccgaccctcatcccagatctggagggcagggggaggccggtgcccaggtttctggcttctgccactggttccctccatggtaccacacaagggaagatggaagtgggtctgggcaccgggagtgtgcccaccggagactccaagagaaacgtacgagtcgtcccaggaccggggtggtgagcgaggccccattttgtcctcccagggcctagtctcagacagactggggtgagggaggtggggacaggcggcgagccagcgggcagactcaggcctggagctcgtcctgttcccctggccacacaccaaggtgttgctgcctcctgctccctggtggccatgcctgctgtccctcctcactggccttccaggcatgggcgctggctggggagggatggaagcgtgccctgccgggggtgcccctcggactcggtcttgccattcgtgtccgggcctgtgtggtggtctctggcctcgcacggcccgtgtgtgtctggggaggggtgaagcacgccgccggccccctctccccgtggggccgagacctcctggtggtcgcctgcctgacggtgtcccgcccgcgtcccagctgcaagctcgggtgccagggcaacgggcccgcctggccgactactgcgccggggccatgttcgtgcagcagctgctgagtcgcggctacggcttcgacgagcgcgccttcggcggcgtgatcttccagaagaaggtgggctggggcggggcggggcggggccgaccttgcggggcggggcctctcgggagctgaggccacgcccttccccgcaggccgcggacactgcagtgggctgggcgctcggctacatgctgaacctgaccaacctgatccccgccgacccgccggggctgcgcaagggcacagacttcagctcctgggtcgtcctcctgctgctcttcgcctccgcgctcctggctgcgcttgtcctgctgctgcgtcaggtgcactccgccaagctgccaagcaccatttaggggccgacgggggcagctgccccatccctcccccaacccctgtatccccaccccgtactcccacccctcccacaacccctgtacctcccacccctgtatccccacccctccacccacccctctcccaacctctctccccgcccctgtatcctgcattcctccacccaccctctatcccccaccgctccaccccaccactgtcttctccatccttccaccccaccctcagcgtctctgcccctaaggcagcccaggaaataggaactgagactctggtacccacaggagcctgggtgggcaaagagcgctcaatccagctccttgaacccctccagcccgcttcagcctgggcatcactgcaggccccgtgctcctcctcctcctcctcagggctgggtctccagagagtggggccttggtcctgagaatcagcccttagaggctccttctgtgtagtctgggtctgtactggggagggtcacagcccacgggctggcagccagcccagcacctacttgtaaaaattttgtaataaaaagtttttcctagagacgtgaaaggagagtgtctgtggggtggggcatccttgctgtggcctgtgcccccaccttcccgctgttctagccgcacgggcctgcccttggtcctgagggtggacaccatccctccctactgccttctgctctggagccaggcctggggcactggctgctgccctggtgtgccgtggcagcctagagtagctgcaggatggctggcccgagggaatgttcctgggcccttgagtcttctctggccagcagagttccccaaaaccatcacatccagatctgcgttggtgaccaaggccagactgaaggttgggtcctggtacagtgagcctgggggtgagggtagaggtcagggaggtggcggagagtgggtggcagccagccaggcggcttcctagggggcagtcagtgctggtagagactggcgggagggcaggcccacatcaggaggtggcacaggggtgggagatgagatcaggaccaggacccataggcaggaatcttgcacagaacctggctgtggagctgagccatgcaatggcacagggcaccttgcccttctcacctgggactgagtgtcctgcacctccaaaaggcatcctgcagccccagccaggccctgcagcccctccccaagccagttttctccaggatgggaaggcctggtcttgcccactcgcctcctcaccttcctgggaagtgagcttagacactgtctctatgctcagtgccctggcgaggagggtggtggttcttattctgctcttccctcccctcttcaccatttttttttaaagtcatttgataaacctgagggcagccagccccagctttggagttctgagactggaaggaccaaggggacaccccgggttggaggtctcactcttgttctctgaatgactagtcaaaggaggtttctagtgggatggggtgggcgtgctcttgggaggcaacaggtgaggtgcaaggggggcatcagagatgcccgttgtcagctgggcacagtggctcacgcctgtaatcccagcactttgggaggctgaggctggcgtatcacctgaggtcaggagttcaagaccagctgaggcaacatggtgaaaccccgtctgtactaagaatacaaaaattagcccagcatggtggcacgcgcctgtaatcccagctactcaggaggcagaggcacgagaatcacttgaacccgagaggtggaggttgcagtgggccgaaatggcaccactgcactccaggctaggcgacagagacgctgtctcaaagaaaaaaaaaaaaaaagatgcccattgtcctgagggagctaaagggctgtcacctggggaccctgaacaccttggacagctcccagctccggtcctcagtggctccggatcactcttgccccctggtggcctcactgagcgcggccgccgcggctccagccaaagctgcagtcggggccggggccgttctgtgttcctgtatttgcttttcccgcgagtgggggtgcccctgcctctgtgggcacacctgtgccttcctgtgcacctgcccagctcgtgagcacctgtctgcgtgcgcccggcgctcctgtgtctctgtgcgctcgcgaggctaggcccacacaggtcctctgccccatcgcgggtgcgggtgaggggctcggagtcctaccgggaagaggccagaagggagcgcatcctggagaagcccacccgcggcccaaacccagccggacttctgggaaccgcaccggccccagagaccgcaggtgccgagacaccctgaggccgagagaggtccagcgaggcccggagaggggaccagaactggagcagggggagggggcgcagtctggagccgccctcccgccccctcaggtggagcgcgcaggcgcagtctccgcgtgcgcgcctcgccggcgcctccatcccggatccttgctgcagcgtcagcgccgccgcccgtgcctttcctcttcctcctcctcctccttggcatccgcctcttcttcctcctgcgtcctcccccgctgcctccgctgctcccgacgcggagcccggagcccgcgccgagcccctggcctcgcggtgccatgctgccccggcggcggcgctgaaggatggcgacgccgctgcctccgccctccccgcggcacctgcggctgctgcggctgctgctctccggcctcgtcctcggcgccgccctgcgtggagccgccgccggccacccgggtgagcgagcgcgctgggcgcaggccgcggggcgccccggggccgggatcgccgggcggggaccgggttgccgggcgccgccgccctcgtcctgcccaggcccgcaggccctgcaggcctggtccgctggtggcgggggccccgcctcgcccacgatggaataaacaggcctggccggagggcgcagcgcggagcctccaaaaggccgcgccggatggggcttctgccggttcccagaggcgtaccttacattcatggcttcttccgccgggagcgcgtctggctcaggcctccgcgccgcggccatctggctctgggcgggcccgccgggagtctgcctgtgtgcgtctctgtgtctccgtgttcggggctcctgcgggtgtggggctggccctgagtgcccgccggcttcgctgccggtgcgcgtcccggggtcggggcctcagtgctgctctgcctgtcctcacgccttgggtggcgctgggcaccggccttgtgcgccatggtgggcgctgaagttctgggggcacttatggcgcaggctcggggtgctgttctagcttcaataggagggagactgttgcagcctcagagcctccgcctgcatcccctgccctcgagggcactggcattctgtctttgggactgagggctgcaggtggactccggaggag

SEQ ID NO: 210 - DNA, 6000 bp, Homo sapiens
gtgatgggcgggaatggggactaccgggctcctccactggtgggggcgccggcccgccgtggggtgcgggccgcctggggtccgtgcggactccggaggtccggtgtctagtggtgagtggtggccgcaacgaggaaaaagttttgggggaaagaaaagtcgggtggaggcgtaacacgttactacaagagtgttgcgtacaggagggctcttaaagtgggtcatagcccgaaggtgttgagagagacggcactcactacctgcagccctgacagcaaaggggtttctgtagagcgggagggaggaggtgtagagggttacggttgagttgtgccctgcggatgcgtcgagtcattttacgcctggaagatccagcattggattgaaacaggctgtattttcttccaaagggttgactggattggtgaggcccgtgtggctacttctgtggaagcagtgctgtagttactggaagataaaagggaaagcaagcccttggtgggggaaagtatggctgcgatgatggcatttcttaggacacctttggattaataatgaaaacaactactctctgagcagctgttcgaatcatctgatatttatactgaatgagttactgtaagtacgtattgacagaattacactgtactttcctctaggtgatctgtgaaaatggttcgctattcacttgacccggagaaccccacgaaatgtaagtggacaggaggtagatacccatttcctacttggggcttggcataagataccaaaaattaaccaaaacgttttattttctagcatgcaaatcaagaggttccaatcttcgtgttcactttaaggtatgcgattcatagttgtgatccaacagttcctcatgttccactcaaaaaaggtagctgcagtgatgactttcttaggacacctttggatttaccgtgaaaattaataaattctgagcagccaccttatatttaggcattgatgatcagggtgtaaggatgtagcgtttgtgaaattgagaagtagtaccagaaaaccatttgaaaacctagtgtgcagatcaagatggggcattttaattgtaattacatgatgatggaatttaaacgttttatagtgaataaatggagttttggagttttctctagcttcaacgaagtttacctggcttttagtcacaagtttttttaattgccttgcccccaaagaatagaaataactcgacattttgaaaagctgaaaattgaaaatttaacgtttactttaaaaattaaagctttgatctagttaaccaacactttattcttcatacttagaacactcgtgaaactgctcaggccatcaagggtatgcatatacgaaaagccacgaagtatctgaaagatgtcactttacagaaacagtgtgtaccattccgacgttacaatggtggagttggcaggtgtgcgcaggtgagaattcttagttgccatttgaaaagacagattttaatggaaaagtgatgggataggataagaatggctaagatctgtgctgatgaacctatttctggttgctgtaatgacaggacaccttggattgatggtgaaataaaccatatcctaagaaaccgtgatatcagataaattcatcttggctgtaatgttaatttaaatcaaggaaaatgactcatcatctccattttctttcaggccaagcaatggggctggacacaaggtcggtggcccaaaaagagtgctgaatttttgctgcacatgcttaaaaacgcagagagtaatgctgaacttaaggtacccaaaccactaacatcctgtgcaacttgggtggttgtttaattaatgttggctgttcagatttatgtccttgattttcttgttttcagtaattaactcttaggattttttaaatttctacctgcagtttccacagaatgaaactatttccttttattttttttgagtccctttatggcaaaattctgtgaagatccagaagcgtgctctgtggtctctttaagcctaacacttagtatttctagttttctgctgtctttttacactggaggtactttaccaggggcttttacccctttttgtgacatacacctttggtagtatgattaattatcaaaatgattgccttagcagtgattaatgtggtttgtggcctaccttcataatggagagtcatgttgcatttcagaaagaaattgtttaaaatttcaaaaagtttaaacaatgacaaacttgtgttgacaaaacacaaatttctccattttgtatattacccattagccttttgcatttgaaggtctgggccagaactggaattagtttaggtctgtatggctccaaaccttctaagccatgctgagaaattttatcatcaagacttcgaattgggttcttccttacccctcagctctccacccgtctaaggatctttgggaaggccactcatagacaaaatgtatagcacactgagtttggtggcaatttagacatgtaaaggtgaaggcagacaactggttaaaaaaatgctatttgcagaataaaaggattgccttttaaaaatgatttcattgaggcaggactctggagcaagcctgggaattcatatttagcaatgatagtttgtggtgttttactaattaaggatgttcctggtttcattctccttcctttcttccccagggtttagatgtagattctctggtcattgagcatatccaagtgaacaaagcacctaagatgcgccgccggacctacagagctcatggtcggattaacccatacatgagctctccctgccacattgagatgatccttacggaaaaggaacagattgttcctaaaccagaagaggaggttgcccagaagaaaaaggtaaataagtagttgctcggttttgtttgtgatagtagaaagatttgtggttgctgtgatgactatcttaggacacctttggaataactatgaaagaaaactattctgagcaaccctttcacctgtcttattttggcttttgtaagtttgtttcttgactaataataaatggtaagttttctgtaatcccagcactttgggaggctgaggtgggtggatcacaaggtcaggagatcgagaccatcctggctaacacagtgaaaccccgtctctactaaaaatgcaaaaaaaaattagctgggcgtggtggcgggtatctgtagtcccagctactcaggaggctgaggcaggagaatggcatgaacccgggaggaggaactaggagtgagccgagatcgcgccactgcactccagcctgggtgacagagcgagacgctgtctcaaaaaaaaaaaaactggtagttttatattcagtacctcaggcccgtatgattatctgctgatggccccacttagatgtacatagccacttcaaaatgggccctctccccaaatctaagaagcttgttttcagtaattgatcacatttagttcttttaagtcaagaacctgagtgattctgtacacttctttttacatctaatgaacttaagttctgttgatttctaccatttaagtatttttcccccttagtccttaacgactaggtttcctgcctccagaataagctgaagtcctccaagatgtactgtggttttctctaagaaacttaacacatttttctttccccagatatcccagaagaaactgaagaaacaaaaacttatggcacgggagtaaattcagcattaaaataaatgtaattaaaaggaaaagaatgttggttgtctttattagtgaacatatttcaagtgtccttacaagatggatcaaatgaggattttttaggattagaactagaaacacaagattgtttaccctgcaccattaaaaaccattttcatggctgggcacagtggctcatttctgtagtcccagcactttgggaggtggaggctgactgcttaagcccagccagggcaacatgtcagaaccctgtctgttaaaaaaaagtaagtgtggtgtcacttgcatgtagtcccagctaattggggggctgaggtgggaggctgcagtgagcactactgcaccccagcgtgggcaagacagaacaagaccctgtctcaaaaaaagtttcattatcccaaaaggaatttgcagtggttttctttgcagaacaatccagtatgtgaatataccagttgatcatccccagttggaaatggctccattgagcattgcctttgagtatgataacagcactcaggctcaggttttgaagctttttaggttgatgctcaacctgtatcatttcgtcaattgataaaggggttttgtttttgctattaggaacgatggtactgtgaacgtttgtgtgcagatttttgtgttttcatttattgagtatatactagagtggaattgctagatcataaggttacctgagtaaacatctgaggaacttccaaatatttccaaaaaggctgcacgctacatttccaccaacggtttatgagggtcccagttttcacacaacttcgccaacacgtactgacatcctagcgagcgtcagtacttttcgtttataaagtgatgtaactgcttcttttaagcaactgacgtttgtaaagttggccttaatgttagtttgctctgcccttgaatttaagaaaccagcaaaactaatagcttatccacagttgcctcaacggcctagctgccaccttccgtgtgggtgccgcgccgtttgcacaggcatcatcctttaccgagatcctgcgttctgggtctgggtgtagtcaggtcaggctttcttcccgcagcgaagcttttagttgggcatctgggacgcgcaggactttcgcgctacctgcaggccgcagagccggaagcctcgccgcgccccttgggcaacactgctgcgtgctgtgcgaccccgggttgacgcaagcgcgcctttgtcgtccccgttgaaggcgcccattggctcggctgcggatcgtccctccctccggaagtgcggacattgtcagctgcgtttccgcggtcgcgggtgagtgtgcccgggctagcggcctgggttgggctttgtagctgctccgcaggcccagcccgggccgcgctcgcagagtcctaggcggtgcgcggcctcctgcctcctccctcctcggcggtcgcggcccgccggcctccgcggtgcctgccttcgctctcagggtaccttccttccgcgagcgcgctcctccgccctccgccccgccctcccctcccctctgtctgtattctttgtccaccaccggcgccctcggagcttgcatttgcctctccgatactttatattgattttgttcttttccgtggccaagtatcggtttcacatcctttctatgaccttcaccgttaggcctctgttctcgtctcttttcaatcattgtcattgactcaacctgtccccgctccctctgtctccactaagatgacatgctcaactggatgacttggaggaaggtgactttccctgttatgccttccctatttcggatggagcctcagactttaactgtctactctgttgtctggacttaagttgagtgaaagaagattcctctgcaacagctttaatccgttttgctcgctttgttggcttggagcgaataattaaaataataatatctcgtagccaccttctagacttttctgacccagtttccatatgtgtgaagtaaaatatcttaccgaagtattattatgaagattaaaagataagatacaaataggcttcattccgaagagagctaaaaagtctcttaaaagccgtaattgtggcgtaagtgattagtagtatttgtcctcgagagtttatgtacatcgtactgtgtgcgaacttacttaaaacacaattgcagaagtaaaaatgaatctttatgatggagggcctgtcagtcactaaactagtactggtagcattgtcagttgttttgaaggggtttcgttggtttggaaagtttggtaaaag

SEQ ID NO: 211 - DNA, 6000 bp, Homo sapiens
agaatcctcccacaccaaaccctcgcagcaaggttccaagtctcctctctccacttccaggccccttgtacccgctcaacgcccaacctcaacgtccagcgcccaacgtctggcccccaacgaccgaagccccctcccttccccttcatgcaggccctctccctcccctatacgcctgggaaccctgacctggaaagaggcaagaggaccgcggatccgaacctgtctctgcggtctggcggtgatggcgactgccgatgctgggagccctgccgcctgggatgcgccctgcacttccctcgcctccaatccccagtgcgccctcctggcctcagcgcacgcctgcgcactccgcgtccacgtgcaactcaatgtgcccacgtgttccctccgccttccccggaagcagcttgtgctctagttacaggctcaaaaagttcctttgcagaaacttttattttgttctagcttcttctagaaagatgtctctggcaacgcctttggcaaatttgggcgcaaagatgcagactttgtctcctcgaaggtcacttgggtcaccgtggccacttaaaggtcttccaaggttttccaaataatcaacagcctctgcctggtcttggaaagtaaacacacacgtgctcatactttttttctttgcttcctgactgagggcatgtgattatacctgttggtgttacttaaagacaagctttttaagttttgtttttttttttttttgctatggaacttttctaacaatttcataagggaacccttgtgtgcctatcatctagtttctaccttatcaattcatggttaatcttgtctacatctgcagcccaggcactcttcgggcaatgttttgaagcaaatccgagaattgtaaatgtgagacaaagtagcgaacgtctgcttctggcccccagcatagtcctccctcactgtgaaaaagccacgtttgttcactgtgtttgtcagcatttcagaccccttgacttagtaacatctcagccctccagaagaatgccttgaagactgcggagagaactcaggttcccacctctcagagtcactgcatttttagaaaagatactttcagagatctaggccttgcctttttctgtacctaacggacaagattaatgatgatgcctagacttactctcgcacccaaactttgaaaatattttgatcttatatagcttctgggcacttttaatgtaacccctgggcagaacctctaccacctaatatttaaagtgtgctgacccactgctttggagtagtttaacagaaattctctgggctctccctggttgcagtcctcagtaagactctgaataaaactaacttcactaacttcaattctttaaaagcctgattttttttctttagttgatgtgtcttttaaatttattttttagagcagtttcagatttacagaatagtgaaatgaaagtgctgactgggcgtgggggctcatgcctgtaatcccagcactttgggaggccgaggcaggcagatcacttgaggtctggagttcgagaccagcctggccaacatggtgaaaccccgtctctacttaaaataaaaaaataaaaaaaaattagctgggtgtggtggcaggcgcctgtaatcccagctacttgggaaactaaggcaggagaatcgcctgcacccaggaggcggaggtttcaccgagccaagatcactgccactgcactccagcctgggcaacagagcaagactgtctcaaaaaaaaaaaaaaaaagaaaaagaaagaaagaaaagaaggtgctgtacagagttctgacagaagccacatcgtttcccctattattagcatggtctgttagcatgatacatttgttataattaaggaaccaaggaaccaacattgatacagtattaactaaagcccatctttttgatttccttcgtttttacctactgtcccttttctgatgcaagatctcatcaggatatcatattacatttagttttcatggatccttaggctcttcttggccatgggacttccttagactttgttttgatgaccttgatgtcaagtttccaggagtactctcaggccttttgtaggatgccctacttttggaatttgtctgatgtttttctgctggtaggaaaggagttacgggttattggaaggaagaccacagaggtaaaaatgccatttttattgcatcatatcaagcatacatcctatgaatatgattatgacaattgatgtaggatttggtcatctggctgtggtagtgtttgttgggtctttctactatattcttttttttcccttcccttttcatactatacactttggaaggaagctattatttgaagcccacatttaaggagtagggagttatgttgtccctctttgaggatgcagtatctgcagaaattatttgaaattcttctgcatgggagatttgtctcttctccatttactaatttaataacggactcggatatttattttatactttttttttcttattttatacttttctaatccaaaactactgtatttccttgctcagatttttccagctttggccacaggaagctctttcagttggtttctgttccttcacatactatcatcaggtggtattttgtttgttaagcactttattactttctgggatattgtatcttttcatccaaaaatattgtaagtaggtgtctttaagagattaccactttttaagtaatatcaccaaaacatatcccaactttaaaaacaataatttctcttgctttcctttcttttctcctttttctcctttcctctcctttcctttctttctgaaagggtcttgctctgccgcccagactagagtgcagtggcacagtcatagttcactgcagtcctgaactgctggactcaagccatcaccctgcctcagtagctgggattacaagtgtgagccatagtgcctggccataatttcttaatatcataaaattaatactaaacatttccagatacctcaaatgttattttttaattttctttttagagatgggatcccactgtgttgtccaggctggtctcaaactcctgagctcaagcagcccaccttggcctcccaaagggctgggattacaggtgtgagccaccacacccagccattcagatgttatcttaaatcgttgatatgttcaaatcagtatcaaaacatcctgtatttgcactcagtgatatattttaaaaaggggtttctctttaaatcctgtacttctcttgcaatttatttattacagtaactgcagggtttttttttttttccattcaattttgttgattgcatcccccggcaggaatacttcacaggtggtgttgtgcttctctattgtagcatttcagaaaatacatagtatgtagttgtttcactttggaggatattaagattgatctagtaggttcaagtggtgccagccccatccatccattacaatacgaagcttcctatcagtttttcatctaatggttctagattcacagatgaccattacctagatccattatttcatcagggtttgcaaaatggtgatcatctatctttctttctgcaattattacatggagttctacagagaagagcttccccacattgactatttgattgacattcagtttgcaacaggaaaggtaggatgaatgcttgattctttatcagttctcagattgtaatgacttgttggcatctttccaagagggtcaatgacattaaaaaaaataaatgcactcactgatttttttacatagtgcgtctcaaccagttgctgttattatttttgaatgctaaatttgtcctgtttgagaagttggggcatctttgaactgccttctgagtcttttgggtacagttcatgttatctttgcttttcttccttgctttctgctacaagcaatatgtcctaggctatcttgcatatttcttgcccctactgggaatcagcacttaacctccaagagaagccaaggtaactttttttgggcaatgctctttagagatcacaatctggggaataggagtgtgcaatgggttggtcactgttctaagagttttcagtggacacaccttttttttcacgaaaaaaatgtaccatgagttaattctgatatttgtaaattcaaatataggattgcagaattttaatataatgtctttggtttatatttgtatttcttttctcttatggtgaaaaacttggttcacaaagatatatttatatactttatactaattataaattcagaaatattcagaaatagtaatacctatgttattactgacgagtaccgaaaacagcttaaggtttcttcagttttttccccttggattaatgtctccctaggaaggcttggtcgatttattgttttaaagtcaaatcatttattttctatgacaagacactttaactgcaaaatgtgcttcagtgtagtaccttcatttaaggaggagtgaggtgccattacacctccgtgtgtgtgttttgccaacagtatcgaagacgcttaacagaacagtagtaagttttgctttacaaattcttacattgcagaatcgtctgcatcagctattttcattcatgagatatgtgtaagacctaaaccaaagaacatcgtttccccggactgaggaggtttgcgaaacctccagagactgaactgctgaccttccttctctgggccgggcgaggcaactgtacccaatacactttttgttgccatgctgcgtgccaggttactcagccgggagaggacacttcctaccatcaatgcgctcagcttgaagccagagacgaaggcaccgacagtttattattaaacaatggcagcagcgccacgctgaagacacgaacgcgctgttatggaacccccagaggtctcccccatcgtagcctgctccagccgactccgcccacgtaaggtgcaaggtttccgcatgagagccgggaagccacaatttcaaattctcttttattgctttatgtccctgactcatgcaggccaaagggtgaggaggagtaatagccaacaagagcgtcctgcagaaagaaacaggctgcgtgggtccggaggagcttgaaaggaagaacccgaccaaagggcaggagacccggctctccaggtcgcggaggcgtgggtgcccagccaggcggagtgcggggcggggcctctcgggccgcaaggtggggcctcctgggccgggaggtgggaggtgagctccgccagcccagcccactgcagacaggttacccaggacctcaaggtgtgctgcgtcaccccgcccgcgctgcgctgattggttcctccagggagcccccgccccctcagctgtaaccgggccggcttcagtgtcgccgccatctttgttgatgtgtcagctccgcaggggtttggggaaacggccgctgagtgaggcgtcggctgtgtttctcaccgcggtcttttcctcccactcttggctggttggaccccgctatggaaaagttggcccctgagccagagctccagcagccttgttagggcgtggcctgaggcttggataagtggggtaagtgtctgaggggtactcggggcacaccggtgagtcgcggtggcggtgcggtggggctgccagccttccgctccttcctgcacgttccgtggcgggggcgagggcgagtgcgaggtggaggtcgaggtcgagcgggctccccgcctggctcctttgagggcgcggaggaaggggagggctggggaacgggtttcaagccctttcctctccctgccttcctccttcggttccgggaccttggaggtggcaaagaggggtcagcgggggtcgtgggggctgtgcctcgagagcgtctgaattcgagcccattgcctgggctgcgtgtgaactgcagccaagccctacctgctcgagaatctttcctagactcaatcgcctatttcgtttttcgtctcaagttgactgt

SEQ ID NO: 212 - DNA, 6000 bp, Homo sapiens
tatatatatatatatatatatatatatatatatctgtttctacaccgcaaaccatgaattgatactgatctctccaattccaacctaagaccagagggttcgttcattctagttttctccctctccatatttgcaactcccttctgtgataacgagaaaactggctattataatctaatatatttacttatttaatgaatccccttatgtataactaatgtatttctgctgccatcctcttccccactgattccttccttatcctctttgggttctgacacaccgtgccaggctgccatcctcactgcacagactccgatacctcatgctactgctcttcagggtcaccttcctcccccttgcccatctctgacattctgttatgaccacctcaggcctgactgccttcatcaccttctcaggctctgactctccacactggctgactctttctctctcccctagatccatggatgcttcctagctgtgctcagtctctggcacccaacacctggccactactttggtgggcaccctactcttccagcttgggctctgacagatcatgctgggaaggatgctctgctgatcatacttgggtttgatagtcagtgcttgtgcacacacatacacccttatcccattagtgatgcagctctgatttcccatgtctcttcccaaatctggacaccttcaggaccctgcttgggctcctactgtccatgctatgttctctcctacttagatatcctttttttcttgttcaagctccaacacccctctttgggccactatggctcccctccacacagacactgctatactccacctaacgacttccaggctggatggcaaggaagagaagggaagaagagaaaggggtgtgtcatcttttagatttccttattagtccttccacagagaaaatgcatgcatgaaaatgtttacaagaggccagtttgctttatatttgcgatagtcacaaaagatctgaactgagaaaaaactgaaatcattagagaaagtaagatttgaagttaactgtcctttcacttggggaagtgaagtcttatttcttttttaggggtttcatgttttgttctgataagtgacttccaaattagacacttagaaataaaaaggctggaatggagacttgatattcttctgtcccaattatcttgttttacagacaagggaattcatcctggtgaggtcaaatgagtttcccaggtttcccaagtgcctgagtcagaaacgtgacatttttcaacatcctggccagtgtacttggcatgctaccctcattatcatttaaaagtattcgacctttaaggcaaatttctaagaaaaatatattttatacattatacattatattttaaatgggaagtgtttttcttttgtaataatatgacttatagaatttggaccctaaaatttatctggctaggtgcagtggcacaggcctgtaatcccagctgttgaggaggctgaggtgggaggatcactcgagcccaggagctctgggatgtagtgggctgtgccagtcactaagtttggcatcaatatgatgaccttcagatgtggggtggtggtgactggggaccaccaggttgtctgaggaggtgtgaactggctcaggtctgaatggagtaggtcaaaactccgtggtggtcaatagttggattgtgcctgtgaatagccactgcgtcctagcttgagcaacatagtgagatcctgcctcttaaaaaataaataaataaataaatgaaacattatttggttatgagttgatttgaaatgcttgggaccagaagtgtttcaaatttggattattaaagatttctgaatatttacatatatataaaatgagatattttggggatgggacccaagtctaaacacaaaattcatttatgtttcatatacaccctataaacataggctgaaagtaattctatataatatttccaataattttgtgcacctgtcaaatgaggtcaggtgtagaattttccattggtgtcatttcagcactcaaaaagtttcatattttgcagtattttggatttggaatttttgaattagagatgcctaacctgtagttctttggtgattatagtttattagactggatgatctagaaattagccttacctatttggtagttagtaacctgaaattttctgaacactttctcttaattgcattatgttaactgggcttagtaaagttggcatgcaggttggtcatttattttactgtttcttattttgtggacttgatgggctggcgaaatgtatgtgcatagacatgaatgactgataaatagataaattatatattctaaaaatcccacaatgtaagatttgtatttgtatttgtattattttcttttttgaggcagagtctcactctgtcacccaggttggagtgcagtgtcctgatcttggctcactgcaacctctgtctcctaggttcaagcgattttcatgcctcagcctcccgagtagcaaggattacaagcgtgcgccaccatgcctggctaatttttgtacttttagtagacacagggtttttacatgttggccaggttggtctgaactcctgatctcaagctatctgcccaccttattctcccaaagtgctgagattacaggcgtgagccacagtgcccagccaagatttgtatttttaaaaaccttttatatttgttaaaatctaacactttatggacaaatttagttttagaaaagctggaaataaacaacttgctgggtatagattagccatttagagcattcattaatttccaaaaatcattttgcatcacggaggtccaaaggaaaaataggcaacaaactatattttaaaatccaatgaaaggcttgaagagtcccacgagctgagtgatttaagaggacaactgtgatattaacttacttctggcccttagatgaaatatttgcccttttagcatcaacataattctgtaaattattattaacaaatacgtagattttataattggaaagagcacagtattaagatcatttagttcatctcccttcaggcatgaatcctcctaccacctactaaaggcggtcacccaggatctgttgatttgaatcacttttgatcatggagaaatcactatcttccaaggcagccatgccttataattccacagaaaccttcctctgggtgactttgccccatgactgctgccttctgtcctctgaagttagatataatatagttaaaccttcttccatatgacaatccttcagcttcgtctgcctagatccttagcctctgggaatgttctctacctgtctctttcttctgcagttatgtctttaggttcctcttctaagattaagattttttccctttccccatcttttcccctttgtctagacttaatgtctctttaaaatgtgctattttaggaggctgtgcattctcctgatgaaaggcaagaacggcatcttgtattctttttattgtccttagtcacgtgaatgcaaaatgtctgagacaggtctcagtcaatttagaaagtttattttggcaaggttaaggatgtgcccctgacacagcctcaggaagtcctgagacatgtgcccaaggtggtcgggggtacagtttgcttttatatattttagagagacatgagacatcaatcaatatgtgtaagatgtacattggttcagtccagtaaggtgagacaattggaagtgggggcttccaggttagaagtataatagacaagagacaaaaggttgcattcttttgaggccatgatcagccttccactcaatagacagtttagtctggcccagtgaatctgcattttttgcataaacgatggagaagagaaagcaatcagatatgcatttgtctcaggtgagcctcagagggatgaatttgaatagaatggcaggcaggtttgccctaagctggtcccttcttgatgtttccctttagcttggtgattttgaagtctcaagatttattttcctttcacagccatctaacagtgaagcatggtttcactttacacttgaaccactatatccaccagatacaaactttgcctcaaacaccacactcactttacacaaacctgttgacatcacacctaagtcagcttttcttgagctcccatatgaacaaataaacattcctctgatctgcggatatcccgccaggaagggccggcttgggcagtgctggctcagctagcccgccaccgctaccattggatttcctctttctcctctgattttaagaagtgagaaaaaaaagcaattcctgttaattatgtagacaatgcaagggtctccaggctccatttcagcaagttggtttcatcaagatcacgaaaagatgcatgcgtccccgagaccagagaggagttagggaccccgacacggaggtggcatcaggtaaccctcaggagtgagggtggggaagagggcatggctgatgctgggaatgagcagcgcccgcggagggaaggccggcggtcctgcgccccggcgtggacgcgcgcgggagttcaggctggggaaatgggtcaccacgtgctacggaggcggggacagggccctcctccccttatttgtaaagagcgccggagcggatcgcggagtttcaccgcggacctgtcagagatacagaggttgtgggggcgggagacagaaagagagagagatccagagaccgagtcttacgttgacacgcagagagaaagacgcagagacagacaaacaaacagataggagaggtgagaggccagcgagtgcttccgattaacttgccaagctcagagaagatccggggagagggagggtcccctttaaacgcgcaatccccaggactccggaagagcccttttctgcagctccttggggactgcacgtctcacttctaagtttgcggcggagagaataaagcagaaagacaggaagaggaggtggagttctacagttagtgtggttttagtttttcctaagaagtggcgtggtttggggctttatatccgggaggagcatatgtacgcaaatcctggggcgtttgcaaacccggatccggggcgtctggccccatgcccggccgggcgtttgagggctactgccacgcagcgtttctggagcctgccggctggtgccctggtggcctttatctctgtccccctttgtcctctttatctcaggctctccaggaggccggggggcccactccgcctatcgctcccctcggctacgctgccacttcaatgccccgcaggtcgcgagctgctgttctttcgaaggcgtcggagaaccaggggcgtcccgcgccacctctgactcggagcagcgccgagcactgacgctcccgcccttgggcaaggacgccagtgcgcccgcgcgcgtccctctgcgcggcagcccgtcgcgggccctcaaggggaagcccaggccaggatggccccgggtcgcgcggtggccgggctcctgttgctggcggccgccggcctcggaggagtggcggaggggccagggctagccttcagcgaggatgtgctgagcgtgttcggcgcgaatctgagcctgtcggcggcgcagctccagcacttgctggagcagatgggagccgcctcccgcgtgggcgtcccggagcctggccagctgcacttcaaccaggtaaggccgccaggtccgggcagccctccgtactgtgggtgtccctagacttcactttgtatatgagccgtttttatttgggaaaagtgcaggagaaagaatcttgttatatttctcaagtagaaggcggtatctggtgacacttgcttttcactagacgaggctgaaggattaaaaggttaacgttgttaagggatttggcagccggaaactgcagttttacgcctgatgaactgagaggtccgactctggtgattttaacattttatagaaaactttatgaagtagttgagggtgtgacgcc

SEQ ID NO: 213 - DNA, 6000 bp, Homo sapiens; identical to SEQ ID NO: 21

SEQ ID NO: 214 - DNA, 6000 bp, Homo sapiens; identical to SEQ ID NO: 13

SEQ ID NO: 215 - DNA, 6000 bp, Homo sapiens
gtggaatttggctgtgccttgggtcgtcttgctttgcaatatcgcctatagttgttggcggttttctgctgaggctgagccgtttgctccagcctccgactaaactcattaagttgggagatttttttcaattggacgggtgtttttaaagtctcgtctttccagccccaaacaaggtgtaacaacgcactcttccttctaaggaatgagatgagagacaaggatcactccagacatctcctacctacggtttggggttttttttcttaaaggcgaggcttgcattcctcagcagctatgtacaaagctccctgaaaccttgtctctctaaagttagtgtgcagggttttccaaggctgagagagcctaatacatggggaagcacttccttgaggtggaagatctctcccttcacctttcctctttttccctgcaggctagtgcctactttttatcagtttgcacaatcgcttagataaacaccgaggaggagattctctttaattatcaaagacacatcttttcagggggccaacaaagcatttatttcacccgccaaactaaaggagagttattccagtttaggaggaagatgcaagcggtttgggaccttgaacaaggcaaatatggttttggtatgtttacttacagtattttttctctctctctttcctttctcacttttctgcttgtgctgtgtggggttggggatgacttggggcttttcaaaatatcggtttgctaacgtgtatgaaatgccgaggactgtggtttaaggggttcggggaaggggggatcagagtcaattcaatgcattgccatattttattacatgtgtgtggtaggagagatggtggagggggaggggggaaaatacaattgcaaagctgccaaaatatgattaaaccgaagcgttaagactgcggagcctcctatctcctcgtcctgtctcctcaaactcatttccttccacagagcaaactaaaaaccagtcctataaagcgtggttttgcaagcagcagatgactcggttttctagcaaaggagctgctaggctcgcactaagtatcagaatttactgttcgctttgcctctgcgcttcattttgcaaccttgtgcaactgacagccaggcaggcagggagggagaaaagcctagcccggcgccctcggccacggttcgggtaggcgagcgctcggttaagctaggaggagaatcgcgacgagaagggtactcaccatcgggcggggcggtggagctggcgtgcggatttcaggcaaacgtttacctttttgctgtctattgcaaccgcgccgggctgacttaagaagcaattctgtgctctgtccagaacattcaaggagcggttcctcatttttaaaaagccagcgagagagacgacagagacagagagaaagaaaaagagaggagggggtgagggggacgcacataaacccagttcaaaaaaaaaaaaaaatcacctcttcgccagtgactcgggaaacgcagaggtggcgagatccgagtacggtccaaccaagccagagccaattaattttaaatcctgaagaattattcagattaaaatgtacagaagtttcgttctcctatgcctacgtgagtccaaagtcgtttccctttaagagctccttttcttttaaagttgaattttaggcagcgaggactcttacactagggggcagacagatactgtacttgctctaatcttaagcaattttttccctcccagcatatgctctgatttagcactgtaaatttttcagaggacctaactctgacagcccctggtgattttcaaagtaccacaagccagtggttaaaaattgcattgacttggaagttcagagggacacaatggaagcccctttccctattcatggagctccagtgtggtggaagagaaaaacacacacggactagattgagggaaaggaggaattcaatgaatcctggaggacggaactggtttctactgagttcagagttaaactcggcatttgctggggtctgtattcatattgtgattcaatctgtaaagaaatacagcccatcaggccactttctgcaagaaaattatattcctgggtgttgagtttctttcttttcttttttagattagggcaaatgttgtcccaactttctctaggcaaattaaagcttgccattcttctcattataataaatttacatctgcaaaaaaagactgagttggatttttaaaaaacaacaataatatattgattttatcttctcagagctttttaaccttagacgcacagcaagtgagcatctctggagaagacatttaaaaatatttttgcccttttttcttctcagtctgtagtcttgtctcttcttctatgcattaaaattaagtataattcatacggtgattttttttctcccttgtaacagcatttcataactgaatgagtcctaaaatacagagtgaaacacccctgactttatggcagccctgtgatcatttgcctagcaggctccaatttgttaagatatggttgggaaattattccattttaatctaaggccatcacgcatacttcaaattccaaaaatctctaagtggactggggaagctcttcctcctcgatattgttccttcccatgtttgtaaaaggtaatctgctatggaagtctcattcaggaggtgagatgaagatttccctataatcaattattttcatcctctattgagatgggaatgcccattagatttcctatctcaaccccagtctcatcacatctcagctgagcttgtcccgaatctgctgacatttgtaacattagcaattcctgaatcatagaggttggaagggaaaacaacaacaactaccaaaaaccttctcctgtgtaatgatttcttttccatccttcttatcctctttaggagaaagttatattgtgtctctaattaacctgaaattctcagcttggcttcattctgtggcaatcttattacacaccaggtttatgatagttcagtgtccactataggtttgctgggcttttttttttttttttaacaactttcaaataaaccgagaacctgcagctttagtgaaatacgtgatttcatcggagaaagagtgagggctgaggtttcgggaatgaagcttaaagaagatttttcctttcctaaaaaccagcccctatctgcccagatctttagtccttacctcatattctgcctatgtgtgtaaagagaattgaatgtaaaatgtgatctatgcatgtcaattatatgtatggtttatttttaaaatatctttaccctgtcaatttttttttcagctaccaaggatgttttctgtggtcatcaatttactcttcatatgtgttcatttctttcctggagctcagcgtcttttgtgtaaaatattttaattgttcacaaacctggttggtttaccggcatgaggttttttcttggtgcaaagtgtgtacaaaggagacacaattttcttgtataaatgtggaataatgataattcactaactggtcataaacaacaagtttactgcgttggaatatagtgtgttctgagagcaattctacatgtttgatgtttaaaaccagacaccctggaattcaaagacacaactgtctcaattattttagcacatggagcagaatggcaataggctatgaagttgttctttttgcagtgacttcttgaggtagaatatggcttgggtttggttcttgtgacctgtactagtattatttcccatttggggcagaatctctgggtgcgttttaatgactatatgaatgcttaaaaggaacttgaggaacaatgaagtccgtactcaactgttctatgacctagaagcatagtcggtgaagtctttgtctgtgtacattgacaaatgtgcatctgatacatgtgcgcttacatgtgtgtacagagggtgtgcacaggggaggctgggcggctgcctcctcctgtccatcagtgggcagaggtctttcccctctcaccatgactgggtgtgtggcaggatgttggctggagagttagctaaaaccagcgagagagggtaaagttgaggaaaattgattctaattgcatcatgacaatcagatgaagtctatttctgcttctcagcatccgagatgctttatttgggcaattaaaatgtcaggccacatacctgtgaaatgttaaccctacaaggaataaacagaaacagaacggcctttatcctctgaaaagaatatatgtcatatatatatgtcaccaaaccgaacaagtgatcagagttaattaagagaagggtttgccatcacccggatctggccaactctttcgtttggaaaatgcctacaagctcagttcgtggcaccttcccaccctcactccctatccctctgcaaagaaaccagggaacttttctttggcattgtgggtactaagatgcgccaggagtcccgggtggtgcgcgagcggcggaattcgtgacatcgccaagttgcgagaggcaaactccccgattccatccaaagcctctcgcggagcctttaagagacgttgtgtgtgcgcgctgcgctagtctccccgccggggcggaaacctcgggtgcgggatgtggggagagcagaggcagcgctcgcagggccagcacgggcccatccccctctcggcggcggcggcggcggcggcgcggccaccccgtccccgcccccccaacccccggtcccccgcgtgccccgcgccgcgccggcgacgccgctcgcgctaggaccgggctgcgcccgcggccgccatggcggggccgccgcagtccggccaatgacggcgagggggcggcgcgcgcgcgcctggccaggccaaccccggctgctgccttataaggcgcgccgtcgccatggcaacgtgcgctaagttgcagcagtcgtgtcaaagttcactatatagagagctcagtgagctgatcgcggagaagccacttctgccagccccggcgcctataaatcgcattccctcccgcgcccccctttttagcatatttgatcactttgattctctgttcttttctctccgcggtgtgtgtgtgcgtgcgcgcgtgtgtgttttcttcttctcctcctcctctccccgagttgcctcctttctccgggtgccgtactgccttttttcccctctttcattctttctctccgtctttttctcccccctctgcgcacgaaggatgtgcttctaggtggtgatctgccctcctctctctcttttatcatttctcccccgccgccggcgagttgactctttccctatgtgtgtgaggcggcggcggcagcagcagcagcagcggctccggcggcggcagcagcggcagcagcgacttcagcggcggcggcggcgctagacgcagcggctccgggcccgacccggcggcttcggcggcggctccggcggcagcggcggcccgggcggcccgcagggaacggcgagcggcctccacccagcgactgcgggcggcggcggccggagagagcgaggcgcgcgccggacgcccggggcaggcggcggcggcggcggcccagcgccaggacgacgccgcgcagcgcccgacgcggaccactttcatgctgattcccccggacccgggcagcgctccggccactccgcgggccgccggcctccgccccggcctgcctggctccctgggcgcgcccgcacccggcgcctccgatctcctagtcctcctgatttcgatggctttcctgaatggctgactgtgggctgccctggacttggcccccggacagtcgcctctcctcctcctctacctcctccttcaccaccacctcctcttcctcctcctcctcctcctcctcctccgccaactcctcggctgcacaccagctctaagagcgagagtgaacgagagagggagggagagagtgagagcgagcgagatctttggagagatttttttttttgcctcctacttctgt

SEQ ID NO: 216 - DNA, 6000 bp, Homo sapiens
aaatggactaataaatatataaatcattcagaatagtgcttatgacttaagtgctgaagaaatttcagctgctattatctgagcatgaccatttgctctttggggtgtgcatataacacatcaaccagagctgtttgatttagagcttatatcttaaagcactaagcctaagtgtatatcaaccaatttaaattctaaatgcagaaccacttctcaacatttctgagccatagtttccccacttgaaaattttgaaattatttaacttatttcagaatattgtagtggaaattaaatgagtccattcaggaagcggctgccttctacttattaaatatagctttgggaaagttacttgtttctctgagcctcaatttcctaatctgagaaatagttatcaccctctttggatcaaatatatatgtaaaatgctgagcacagttactgtcacaaaaaacggccattattattctttaaaaagacattaagtcttggtgggtcggagacctccagcagctcagcaaaattgtcaggttaattaaaggtttatccaccttgaagtttagaggcccttgtatttctaagccctaagacacttacgcagactgggaccagaaagaatacatttttacttccttatacctgtggttttagagggtagacaaacaggaacctcaaaaaagaataaaccagacaaccaacttatgtgaaggtagaaggttgtttacagaagccaatgccttagcaatgactccatgatctttctctcttagaaattaactgtactgaatttaagtggataatcagaaacaatttagatatggaaaagatagcttgcatttcatcttgtttcaacaagtactaaaagtacatttttctttttaactttgcaagaacagatttatttatacattttaattctactcatctttatttctacaatatttcatggcaaataagatgtactgattaccatctttaaaataatgtatcttcatttgactctcaaccacttattcatgattatcctctagctatgggtcatagagttgttcttttaagatactagagatatcttaacatttttcactcatttactgttaacttctacagaattaaagatcttcatgtttgagtaaccattcagaacctccattctttttcttagtcacatggccatcttccctgtgtgtcttctaccttcaaacctctccttcttatcaggacattagtcactggatttggaatctaccctaataatccacctcatcttaacttcattactgtacatatctaagttcacattcacagatgggggatgggagtaggactgcaacacaatttttttttttttgaggggagaacacatttcaacccacaatgggttcctactattatgagacaacatataatatatacattgccccaaaagtataatgaaaatgtgtcatttacaaatgaaatttgtgctacccaccaatttctcaactctacctttatcccactagggagaaaatgccagccagtattagacatgcagactacaggcatgcacaagaaaagcatattagagaatacataggttaatatttattgagctcctactttatatccagttctttactaagtgctagggatacaagaaagaagaaggtaccaatccctgctctggtggagctcatcctggtagcctggactggttccatgactttggtcatcgtaacagccttgtattcataaagtgagcaaaccagttatcctcatcaccttaataagtaaaagaacttagagacagtcattacagattgatcatacaccacccatttcaacaaaatctgtaaaagttgaggggatgaagatgagttgctgaagatgagttaacttttttttgaagttaattactcatatacggctttgaaaccctaggggaaagcaaaatggaaagcaaatcagatgaaaagagggtaaggttcctgccagctatcttgattcccttgcttacccttacccttcaccaactaggaactagaaacatttgttctgtttatgtgctctgaggtgtgaacagagcaccttagagtgaattgccatttcaagtcattatttccaaacgctctgaacatgtgttacataatcataggataaaagaaagcgataactattgtcagagtctaaacacctcacttttataggtgaaacaaaggtgttagaatgtgacttgattagggccatgtaactgtaatagtactataagctccttgaaagtagtgaccctatctggttttggtgacctttacattctcagagacttgtatgagcctagcaggtagtattcagtaaatgcatattatggaatgaaacaatttgaataatgagtcagaaatacaccttttaaatactttttctgctgccataatgatttcaaatttttgaacaggtttaagattctaaatttaaaaaaacttcaggttagtctaacaaatgttgacatcatcatttacccaagtgctgttaaaaattatttaaaagagaatagtttgtgctacacactaatagtcttggcttctgctctcaacatttcctggtctttttacctcttttgcattagatagaggaagaaagaagctaaaccagattttgctgcctgttcacccagtaagccttttacaatagctgttatttggtcccagctgttgtgctaaatttaggtttttggcttatctgtaactgttctgtctcccattaccaagtgcttgtagaacaagtaaaacttcagttcattttttaaaaactacataatacagtattcaataatatcaaagtcaaatccactgggatttaacatttgtagcattttatagattaaagaactgtttccatttgtcagtttcatcgtcatgatgccagaacatttcagagaaaatgaaatgttaccctcctgaatgttctctccgctctgattagatacaatcgtggagttaaggttaacaatttcagttgtacatgttattttactgtacatatctaagcactagaaaatgttactttttaaatatttcatgcctttttcataagaactttacctgaggccaaaaaaatggaactgccaatcttgcagtttataaaactcttctgatgtgaaaataatagactcattgtaaaaaaaattttaaaacagaagggcacaaataaaaaaaatccccttagacttgtcctaatactttcctgtgatccttttatgcaaaattatatctaaaaaaaaaactttttctaatgaaaccaaagagccttgcaaatttttacttgtctccatttgggctcatgccccatatgtactttgtctatagactgagtagctaatagctgcagcgcttgttaggattgggtttttttttaagtacagcagattcctgtcatctgtttgtgtttaaatgacgacaacatcacaacatgaaatgccatcatgtcacattgctatagcacaacaacaaaattacagctccccaacaataacatgctgtcaaagtgtcctcctgcccatgagtcagtgttttagaagttatgaagattatttttagcacagcgagtgtcttggaagcttgggttctgaatcctactaaaatccttagtgatttgggaaaatctagggtgggggtgggcttcctgttcttaaattctcccactccctgacccgcatagctgcccaccccccgtcccggtcacattaaacccgggttccattatgcgctgcaatccacttggggctcgatcacaactctgtgccagcatcccgggaggaggaggaggaggaggaggagggggggaaggagggggaggggggaggaggaggaggaggaggaggaggaggaggaggaggagacgacgactataattatcctccacgtctggggcaggcctttggatgacatctccccagttaccctgcgctctaatagcgcagctccgattcctggtctcagaatccaggcgcgcctctgccggctgggagcgcaaccgaagtgcctgggacgtctcgggcttccgggactctgctggtgtctcccagccgccatctccagcgccctcgcacccgccgggcacctgcaccgaaaacccggccccaaactagcgccccggggcgagcggcggcattgccatagtaaccgggcgccagggccgcggaggccgccggggaggaagtgacgaccggggtgggttggctgttgttgggacacgtgacctaggcagtgttttgacagggcaaacagcagagaaagaactggccgagcgagggggacggggagccggggcgccagagctagagacagcgggcgggcaaggagctggcagaggcgctgggcaagagggccggccggggctacgggcgggggaagcccgggggtcgcggggctcgggtgccagtcaggcagggcggaggggctgagcgcagggagcggagcgaggcggtggctgaggcgcgggtggatggccacaggggcgccggggagccgcttcgggctggtcgtctcgggtccccacggtcacctgaggcagccgcgggggccgctgcgctccatactccgctcccgctggccctgcgcctctcggagcctggggtctgaggtgggagtgtgatgtgagctgctgggcgagcggtggagagaagtgccaagaggaggcgggattgggacgggagaggagagcgagttagtcagcagaggtcggccgagggagcggaggagccggccagctcgagagcgccatgaaaacaactctccagcggggagaggggcagacgcggcgctcggtgcggcggggctgaaggaaatccggggccgcggcgggacggaaggggttgtgcagagcagggggcgagcacaggctgtaaacacctcccccggagccggccgcggaggactggttgggagttggtagggtcgccccgggacagcccggaagagttcgtttggggctgggggctgggcgggaggaggtgactcgggtttctgtgtaaacttggccgcggttgccgcaggaaggctagccagagggtaattacacaggtgaggcccggcggggcgggcggagggctcgggaggcgcaggggactggaagagttggctgcgcccaggcaccaggtggaagaatttccataccagccctgcggaggtgcctctgtttccagaggcgtttttgtacgaaggggttagtttgtgttgctcaaatctttttcttcttcttgcctgtacctccaggttataaatagatcctgttttggttcagagactgtgtcagaaggacacattggcctggagagcacagaggcagggaagggggtgctcgatccggaggagatgggggaggcggtgcagagagttttgcttttttcagaccagccgagggtgctgtcaccgcagttggtgccaggaagaggcctaacttaacagtagtttacttgcaaggtccgggtattagaatagggccagattaattttatttttgtctctttcagcattttgaaagcgaagcagaagccgtagaatcagcggcgagcctgttgaaagaacccacaggtgcatttcacagcactctgggcgaaaattggatgtgaaaatgaagccagaccgaggtaaatgatttgtttaagtagggcttgttcccccacccccttcttttctatgcctcaatttagaagtgttaacctaattctgcagtaggatcaactatttctgtatcatatgtgattatctgtttttgtgacagattccagctggtgaggtagagaaaggcatatggaagagaaggttaagcgtttttacaaaagtgcttctgaagcactagcttcaagagagattctagtgtatctcaaaatgaaagtaaagaatggtatttgtatctgttgccacaatacaggtatcattttagagttgtacttgctcgtttttaggtagtcaatctaacttcaactttcaagaagttcataagctttttaaacttgaa

SEQ ID NO: 217 - DNA, 6000 bp, Homo sapiens
ctgggctcaagtgatcctcccacctcagcctcccgagtagctgggactacaggcacatgccaccatgcctggctagtttttggtattttttgtagagatggggtcttgccatgttgcccaggctggtctcaaactcctaggttcaagcgatcctcctgcctcagtctcccaaagtgctgggattccaggcatgagccaccgcacctggccctgttgtgagaacttctgactctttcctggagtggggtgcagccagggcagggctctgagcctacagggccctgacctgactcaggtggtctcaggcttcctctggctccacaagaggagcagacagcagggagcagacagaagggagcaggctgtggggtgtccaggtgggaaaggatggaggctgtggcagggtggggacagtggaggggaagagtttagtttctgtaggtggagccaataatatctgctgacaggttggagtgggtgtgaaggagagaggtgaaggaccaccccggagtgtttggcctcagtcactggaaggacagagctgccactgacctaggtggggaaggtagtgagggagcaggttctggaggaaggtcagaagctcagtttaggatatgtaaagcttaaaatgcctctaagggccaggtgcattggctcacacctgcaatcccagcactttgggaggctgaggcgggtggatcacgaggtcaagggattgggaccatcctggccaacatggtgaaaccccgtctctactaaaaaatacaaaaattagctgggcatggttgcgcatgcctgtagtcccagctactcgggaggctgaggcaggagaactgcttgaacctcagaggtggaggatgcagtgagccgagatcgcgccactgcactccagcctggtgacagagcaagactccgtctcaaaaaaagaaaagaaaaagaaaaaggaaaaaaaaagcctctgagatcttccatcctttcccatggaaatggtgaatatgatgcaggatgtaggagcctggagttcgcaggaggtgtctgggctggagatagaaatttgggggttagggttagggccaggtgcagtggctcacgcctgtaatcctagcactttgggaggctgaggtgggaggatcacttgagctcagagttcaagaccagcctgggcaacacagtaagacctcatctctacaaataattaaaaaagaaaaaagataaaggaaatttggatgtttgccgggcgtggtagcttgtgcctgtagcagtagctattcaggaggttgaggcaggaggaggattccttgaggccgggagttacaggctgcagtgagctacatcacatcactgcattccagtctgggtgacagaacccctgtctctaagaacaacacaaaaaactgggcgttggccgggtgctgtggctcatgcctgtaatcccagcactttgggaggccaaggcgggtggatcacaaggtcaggagatcgagaacatcctggttaacacggtgaaaccccgtctctactaaaaatacaaaaaattagccagcgtggtggcaggtgcctgtagtcccagctactctggaggctgaggcaggagaatggcgtgaacccgggaggcggagcttgcagcgagcagagatcgcgccactgcactccagcctgggcgacagagtgagactccatctcgaaagcaaaacaaaacaaaaaactgggcgttgatagcctagagacaggatttaagctgtgcatgtaggggaggcaccccatggcatgagtggtacagagaggaggatagagacctaacacctggggctgccgggaataaggggttgggggccagaactagatgacaatatggttacgattggcagtgagtgccatgagaaagtacaagtcattttgaaagcatataactggaagcctcacctagtctcaggttgggtggagacagggaggtctttctggaagagatgactcctgaggtgacacctgcagcctgagtagctacacaatcaggccagaaaaaaaaaggcagcaggggagttcctggccgagggcatgagggctggcagcaagtgagcctcgggagagggcagagagctggagcagtcagtctggcagggaggggtgtggtgagaagggaatctggattagtcatcaccaaaagatctgtgccaagcccgggttcagatctggttctgccaccctccgtgaccctgcctttcagaatctccattctctctcctgccctgcagacaaggcttgtgtagcagttaccttggcctggccccagcaaggcctcaggaaacatcagctgcaactagttttgtctgttgtgatgttgttatttgacctattatattaattatattattaacgcataagggtagtggttaaggatacaggctagggagagtgactgcttgggtttaacctcagagtcggtttacttatctgtaaaatggggataataaatagcatctatgtcacagggctgttaggagaacaagggaactgatggacgtcaagcacttggaggagtggttgatggttacttgtttttgtatcttttttttttttttgagacagtttcgctcttgttgcccaagctagagtgcaatggcacgatctcgagtcactgcaacctctgcctcccgggttcaagcgattctcctgcctcagcctcccgagtagctgggattacaggcacacgccaccacgcctggctgattttttgtatttttagtagaaacaggatttcaccatgttagtcagggtggtcccaaactcctgacctcagtgatctgcccacctcggcctcccaaagtgctgggattacaggcgtgagccaccacacctggcctgtttttgtactatttaaggaagactaagagtctaccagctgaggaatacagctggcctcgaggctgagggaacagcatgagcacagacacagagctaatgggggcatttacaaagcatttatcaccaatttatttatttatttattggagacggagtttcactcttgttgcccaggctggagtgcaatggtgcaatcttggctcactgaaacctctgcctactgggttcaagcgattctcctgtctcagcctcccgagtagctgggattacaggtatgcaccaccacatccggctaattttgtattttttagtagagacagggtttctccatgttagtcagactggtctcgaactcccgacctcaggtgatctgcccgcctcagcatcccaaagtcctggggttattggcatgagccactgtgcccagtatttatttgagacagagtctcgctctgtcacccagattgtagtgcagtggcatgatctcggctcactgcaacccccgcctcctgggctctggtgatccccccacctcagtctctagagtagctgggactaggcgcatgccaccacattcagctaatttctgtattatttgtagagacaaggtctcactatattgcccaggctggagtcaaactcctgggctcaagagatcctcctgcctcagcctcccaaaatgcagggaatacaggcatgaaccacttcacccagccaccacttaagttttttttttaataatcagtattgctgcagatatcatttaattttgatagggggcctagtggtatggagcaacccatgttcccattttacagatgagaaaatcgctgctcaggaatatcaagccactcttttggggttgtgcagttattacagggcacagccaggattcaactcaagcctagccagcctgcagggtaggggataagagccagccagcctgcctgggggccagatttagctccccccgatgagtcctgaaaaagtactggactcccgtggctcatgcctgtaatcctagcactttggcaggccgaggcaggtggatcacctaagatcaggagtttgagaccagcctggccaacatggtgaaaccccgtctctactaaaaatacaaaaattagctgggtgtggtggtgcatgcctgtaatcccagctactcgggaggctgaggcaggagaatcgcttgaacctgggaggcagagactgcagtgagctgagatggcgccactgcaccccagcctgggcaacagagcaagacgctgtctcaaaacaaaaaaaaaaaaaaagaaaagaaaagaaaagaaaccaggctatgtaaaaatattattgtaaaaaattaaattaaatcaaaaaaaggccggtagcccatacctgtaatcccagtacctcacagtactttgggaggctgaggcaggaggacggcttgaggcccggagttcaagagcagcctgggcaacatagcgagacctccgtctctattatgtaaaaacaataatattttttaagtaaataaagaaaccaggccgtggccaaaggaatcttcctgtgtctggggccttctttagaggctagcatactgaggacactctttgggccagtccaggaaggaatgattctggtggcccctgactggggcgggggcgtggtaaggttcgcctgggaggcggcgcaggcgctgcctgcggtttgactgccatccgggctgctgcaggcactgggaaaggcaatccagcctcaatcctcgccacagacacgggcgactgtcccccagcgtgtgagtcaaaccatactccaggcctccaggaggtgtttgtcgcgacaacacctgcagagggcccgtgcggagtcccttagtgagcggaccgaaaaccgccaccctggaaggatattggcatgccctagggtgaaaattcacactacgacactcggggggtgggtcccctccgagttctcgtccgcgggtgcctccacccagacctgaggggtgtcgggaagacccccgcctaccgagtcagggcgggattaagacctccggcgctggaaacgcgtagggcggggcccagacctggatccagctagccgggcggtgtggggtgcgcatgcgcaatgtccgcttcggctctaggaccgcgcgggcgacagcagggccgcggtgcagtgtccgacccgagagttgcggcctgagtcaccggccccgccctccggagccggacgctgcgggaggcccgggagcggcagtggaaccgactcccagaactccggacgtgtgcggcggtaagcgcccggcccgtaccccctccgcaccccgcaactccgactttggcggcccccagacccggcgaaaccgtgaagtctcggcctcaggagccccccagatccatggtctcagattcgaaccctcagacctgttcgatctccttttatgccgtcccggggacccttctccaccctctgtctcatgatccaaaatacaggcccataggtttcagagataccctgtgaattcttccttggggtgtcctgaaccgcgatcgtagatctgtgcccccagttccagcggggaaccccattgtccgggaacccagagctcacagccacgatcttagacccgagcccacagagccagaggtgacactggaatcctgccgctgggaatacctaaattctcaagcccacatttgggatttcctaaaccccgccctggggccctttaggccgtggatgtttgctccgcgcccatgacctgccaaggacctctacattcaggctgggctctggatctcacattctagcgcccagacatgtcgggaacgccttacgccaacttggggtccccaccaagagaacccccaccagatctgcaccctccccttcacgcgtgcacccagtccaggctccctcaagccccacgggtgccttttagacctgaggaggttgcaaacctgatcccccatacctgccccacccatccgcggacaacccgccctcgcaaactcagacccccacccggaggcttcagattcctcccaggtccagctgccggaaatgcgtgtttgaagggagggtgtgggctcaggggcgaagcacccactggtccccttttttccccccagcagtgagtcgcagccatgt

SEQ ID NO: 218 - DNA, 6000 bp, Homo sapiens; identical to SEQ ID NO: 25

SEQ ID NO: 219 - DNA, 6000 bp, Homo sapiens; identical to SEQ ID NO: 33

SEQ ID NO: 220 - DNA, 6000 bp, Homo sapiens
ctgtcaaaaaacaaaataaacaaaaaggccgagcgctgtggctcacgcctgtaatcccagcactttaaggggacgaggcgggcggatcacctgagttcaggagttcgagaccagcctggacaaaatggtgaaaccctgtctctactaaaaatacaattagccaggcgtggtggcaggcacctatagtcccagctactcgggaggctgaggcagagaatcgcttcaacccgggaggtggaggttgcagtgagtcaagatctcgccactgcactccagtctgggcgacagatcaagagactctgttccccctccttacccagccccccccccaaaaaaaactacttgcatcaaaatttctggaagaatatgtacaaaaatataaaattgaaattttaagggggagttaaacacttttcactgaattctgttttatattttaatgttctttaatttttattttaaagatgagggtctggctaggttgctcccgaacccttggcctcaagcaatcctcctaaaagtgctgggatttacaggcatgagccaccgcgctcagccgaaagatttttgtttttgggtttttttgttgttgttgagacggagtctcgctctgtctcccaggctggagtgcagtggcgccatctctgctcactgcaagctccgcctcccgggttcacgccattctcctgcctcagcctcccgagtagctgggactacaggcgcccgccaccacgcccggctatatttttgtgtgtttttagtagagacggggtttcactgtgttagccaggatggtctcgatttcctgacctcgtgatccacccgcctcagcctcccaaagtgctgggattacaggcgtgagccaccgcgcccggcttttttttttttttgagacggaatctcgctctgtccgccaggctggagtgcagtggcgccatctcagctcactacaacctctgcctcctgggttcaagtgattctcctgcctcagactcccgagtagctgcgattataggcgtccaccacaaggcccgtttgtattttttaattttttttttttagacggaatcttgctctgtcgcccaggctggagtgcagtgacgcaatcgcgtctcactgcaacctccgcctcccgagtagccgggattacaggcgcgtgccaccacgcccggctaatgtttgtatttttagtagagacagggtttcaccatattggtcaggctaatctcgaactcctgacctcaggcgatccacccgcctcggcctcccaaagtgctgagattacaggcgtgagccactgggcccggccgaaagatgttttttttaaatttaatttaatttttgagacggagtctctctctgtcgcccaggctggagtgcagtggtgcgatcttggctcactgcaagttccgcctcccgggttcacgccattctcctgcctcagcctcctgagtagctgggactataggcgcccgccacccccggctaattttttgtatttttttttcagtagaaacggggtttcaccgtgttagccaggatggtctcgatctcatgacctcgtgatccgcccgcctcggcctcccaaagtgctgggattacaggcgtgagccaccgcgccaggtcgaaagatgttttttaaagctcatttgtgatgtagcctctgtggaaaatggtatgacacttccgcaaaaacagaaatgccgtatgacctagtaatttcactttgtgatgtatactctaaaaaaatagaaagcctaaactcaaacagatatctgtacactcatgttcatagctgcattatccacggtagccaaaaggaggaaggaaccaagtgtccattggcagatgaatggataatgtggtatatatgtgcaatggaatgctaatcagctttaaaaggaaggaaattttgacacatgctacaataaggatgaatcttgaagacattaagtgaaataagacaatttaaaaaggaaatataaggatgaatcttgaagacattaagtgaaataagacaatttaaaaaggaaatattgcacgattcatcttatatgaggtatctagaggagtcaaattcaaagacacagaaagtagaatggtggttgccagcgtctgtgggcagaggggaatggagagttaatgctgaatgggttcagagtttcatctgggaaacaggaaaaaggactggagactgatgcacaaccatttaaatgtatttaatgctacagaactgtacagttaaaaagtgttaaattttgttgggcatattttaccacagctttaaatcctaattgtatcgcaagataatgggtagataatgaacagtggagcgcccgcaagagtattacacacacagaaatgcaagacttcagagcagattattttcctaagagctggtctacttataatatatttttaggtatggctagtagtcgtagatttaggactaaaacgaccagttgccgcccaacgtggggctcgaacccacgaccctgagattaagagtctcatgctctaccgactgagctagccgggcgcccgatgaccgtatctcaacaatttttcattctagatcagagtcggagtgtattcaactgcgggtttgaacttggatttatttggagtgtgataaaactactaaagtgcctcggctcctgggaaattcaaactctgccgtcagtgcctgaccgtccctcccacttacgtccgtttcctgccccttctaccctaccagcgaccaagccattttctacccgcgatgaagctcacggcacggagatggagaaacgtgcaccctgacgccactggagctctcaccgtgtggattttttttttttttttttttttgacagagaagactctcaaaaaatgggcctacctttcaccacgaactgcggctctgtcgcccaggctggagtgtcgtggcgcaatctcggttcactgcaacctctgcctcctggattcaagcacttctcctgcctcagcctcctgagtagctgggattacaggcgtgtgccaccactcccggctaatttttgtatttttagtagagacggggcttctccatgttagtcaggctggcctcaaactcctgacctcgtgatccacccgcctcggcctcccaaagtgctgggattacagacgtgagctacctcacccggtcaagtaccgtgtggattttaaaacaggagggaaagacaatggggcccagaggagggcaggggccgccgcggtctttttctactccgcagactccaccctctgggttttttcttggagctcttcaaacatgctggatttcaaaatttgaaaggaaaatcgaaaacaataattgaatgtgcaaaactacactggagatgccggggatcgaacccggggcctcatacatgcaaagcatgcgctctaccactgagctacatccccacctactctcagcagctctcccagatggtccctattggtcgcttaactcaggacaccgggagtggaaggcaaccggtacgcgctgggtctcagccgctgcaaaaacccggcatcgcagggcaagagttgttccagcgtcctccgctgactccaaaccagcgggtcttgaccaagggattccaagagagaggattaggcccggctaagcacctgggagcagctgtggaaaaaggagagacaatcatcaggcacgatgccaaaaatgaactgtgacctgaaaaagagaagaaaggaaaattgtgcaggatgctacgttttgttttttaaaagtgggggttgaggcaataaaatacggaatatttgattaacgtaatccagaattgtaaagttgattgctcgggaggaagaaaggactgggacacaggcgatgggcctactttccaccgtgaactgcggctcctcttttgaatttcgaaccaagtttaatccaagaaaaccttactgagcttgccaagaactgctctaaaaacaggattcagccgtgaacaaacctagtacagtccatctgaaagctgacattccagaggagatagagtgcgggcacagagccggccctgagaagggagcgcgctaagagacgactttacacagtgtgcgcgttcggggcgggcttcgtgggcagagacgtttgaaacaagacctgaatgaggtgggagggagcatgcaggtggtgggagaaaagaggtccacgcaaggggaacagccagcgcagaggccacggggttcaggaacagcaagaagatcggggacactgggtcctggaaggccctgagaagggaagtcgggaaggagggagcatccgggggcagatgaggtgaggcgaggtcttcgcctttgggtgagaattgctgaagttcccggtgacattggcaagggcggtttctgaggagggtgcgggcgaaagcttgatccaagtggcctccagagtgagcgaggagagagggtgtggaagcggataacacaggcagctctgctgcggggctgtggagacagctgggggacaagagagcgctgaggtttgtgtgtgtgtgtgtgtgtgtgtgtgtgtgtgcggtggggggggaataatactgaatacaatgggaaattataaatgtgttatctgttcaaatactaagtaaagagtaaagaagccggaggacagtcgcagaaaaggtaatggaatggatacaaggccacgcttgcgcgtgaggggacaggaccaggttccagtctctaaatttaactcagcacagggccggggcgaacctgcgctggcggaacctgacaccgtggcccgagcgccaggcccttgccccggcgatgctgggtcggcctcggtcggaaaccgggagtggcgctggcagcatttgtgcgcccacctgtcgcggcccgtttcccgcggctgactgggtcaggctggggcggcctggagagtctgagggacgggggcgagggggagaggccgctggccagggcgggggctggtggagcgcagatccggggcgcagggcgctgtcccgcacttgaatggcccgtagtcaacgtgcgcctcccctcccggctcccagccgggcgcgccccgggctcgagtctctgcctgcccagtggcagccccgcccttcctctcccagtgggccctcggcgcccagctccgcgtcctgtgaggtccagtggccgcccaggcgcgaccagatctgggtgcgcggagagcgcgcatggcggctgtgggaccgcggaccggccccggaaccggcgccgaggctctagcgctggcggcagagctgcagggcgaggcgacgtgctccatctgcctagagctctttcgtgagccggtgtccgtcgagtgcggccacagcttctgccgcgcctgcatagggcgctgctgggagcgcccgggcgcggggtctgttggggccgccacccgcgcgccccccttcccactgccctgtccgcagtgccgcgagcccgcgcgccccagtcagctgcggcccaaccggcagctggcggcagtggccacgctcctgcggcgcttcagcctgcccgcggctgccccgggagagcacgggtctcaggcggccgcggcccgggcagcggctgcccgctgcgggcagcatggcgaacccttcaagctctactgccaggacgacggacgcgccatctgcgtggtgtgcgaccgcgcccgcgagcaccgcgagcacgccgtgctgccgctggacgaggcggtgcaggaggccaaggtgagcgcagcccccacccaccccgtgggtccccgggaccccctgacttggtcccgcgctcccgcgcacggggtgcagagaacagcctgtcgatcaggaggcccgggtgagcccctcccttctttctccattccaggaagcccagcgctggttcccgggctgagcgcggttctctgtcacccccaacatcaccaatacccccaccccacccccactgcgtttccctctgggccagatactgggccgcctgcgcgacgtcccccacggacttggcgatgttcttcctgtctgttcg

SEQ ID NO: 221 - DNA, 6000 bp, Homo sapiens
cacaaccacggctaagcctttctggcccgcccgccccatcgcagggagaggacggggggacgggcaggacgggcgcctggacagctgggttcctcccgcaggtgcttctgaccccggcatggaggaagcgcccgcgttctcggcccaggcccgcagccagggctgctccgcccgctgcgccccaggtaagccgggccagcgtgggggagtagcggggcctgggctgcggagggggccgccctgacccgcgtctccccccagggcaaaagccccgcaaggcagtgtgagctggagccgccagcctggggacctcttttaagatgacccgtacggaccctccggacctgctggtgtcgaccgtgtaccaggacatcaaggtggcgaccccgggacccgcgtccaagtgctcgccatgtgagcgatccgtggcccggcctgctgagcccgcgcctttcaacaagcgccactgccgcagcttcgacttcctggaggcgctggacgggccggccatggagaccctgccggagccaccgccgccggagtccgctgtgccgcgcgcccggacccgcgaagccgagccacgccgccgcgcccgctccaagagtgcgccccgcgcgcccccgggcctgacgcccgcgcccgcctcgccgccggtgttgccccgccgagggcgggaggcccagcgtgcggcgcgggccgaggcatcgccgcgccgggagcccgcgtacccggcgctccgcgcccttgccaacgagctgcatcccatcaagttgcagccgcagcggggcggccccggccgcgtcgcgcccctgtgcgccgccgcgggccgctgcgcaccgcccgagccacccgcgggtcccgccccccacgtgcgctgccgcctggacatcaagccagacgacgcagtgctccagcacgccacccggggctcgcggtcctgcgggcccaccgaggccgcgcactgggcccgccccgccccgcagttccacggcctcacggtgcccgggccccgccacatggcgctgtcgcgcaccccgacgcccagcgactcatactgtgcggatccccgggcgttctactgcgacgggcccctgcctgggccccgggactacgccgagcgccgcagtctgcccttcaccaccccgccgggccccacccagttcttctatacagaggagccccaaggcttccggggcagctttgcagccagtcccggcccaaccttcgacgcctactaccccaggccctatccgtccgaggagctctcggggcccagtccaaggcgcatgggcggctactacgcaggagaggtgcgcaccttcccaatccaggaaccgccctcccgctcctactatggggaggctccacgagcctacggcctgccctacgggccccgctatgtccccgaggagccccgggcccactccaccgcccgccccttttacacggaggacttcggaaggtaccgcgagcgtgacgtcctggctcggacgtacccgcacccgcgcagcagcccggcctgggcggactggggcccgcgaccgtaccgcaccctgcaagtggtgccgccctctgaccccgacccgttgctcgcctcctggcacggcggcaccggcaccagtccgccccggctggccaccgacagccgccactactcgcgctcctgggacaacattctggccccggggccgcgccgagaagacccgttgggccgcggccgcagctacgagaacctgctggggcgcgaggtgcgggagccgcgaggcgtgtcccccgaaggccggcgcccgcccgtcgtcgtgaacctgtccacctctcccagacgctacgccgcactgtccctgtccgagacgtcgctgacggagaagggccgcgcgggcgagggcctgggccgcaactggtacgtgacgcccgagatcaccatcactgacaatgacctgcgcgccaccgagcgcccgagcgccagggcctgggagttgcccgggggccgcacgcggccacctccccacgcggcccccgacggccccacctctggccgccagcggagcctagagcagctggacgagctcatcacggacctggtcatcgactcgcgacccaccgccggccaggcctcagagcccgcggccgactgcctgggcccccaactgcgccgactgctggactcgcggcccgcgggctccggggcccccgcgctggcgccgccacgctcgccccccgcctcggccggcagcgccgaggagcccgcggccccgggagaggcggccgacgcgtcccccgaacccagcgccgacgaggacgacctgatgacctgctccaatgcgcgctgccggcgcaccgagaccatgttcaacgcctgcctctacttcaagtcctgccacagctgctacacctactactgctcgcgcctgtgccgccgcgaggactgggacgcccacaaggcgcgctgcgtgtacggccgcgtgggcagcgtgtgccgccacgtactgcagttttgccgcgacagcggcccggtgcaccgcgctttctcgcgcatcgcgcgtgtcggcttcctgtcgcgcggccgcggcgtgctcttcctgggcttcccaagtccaggctcggccgacaacttcctgcgctttggcctggaggggctgctgctatcccccacctacctatcgctgcgtgagctggccacacacgcggcgcccctgggcagctacgcgcgcgagctggcggccgctgggcgcctctacgaaccggcagagtgcttcctgctcagcgtgtccgtggccgtgggacccggcaccgcgccaccggggacaccggccctgcccgcgcccgcgccacgcagccacgggccaacagtgcgcaagttcgccaaggtagcgctggcggccggcagccccgcgcggccgcccccggcgcggagccgcgagcccgacatggagacgctgatcctgacgccaccgccgggcacggcgggcctggatcaggacggcgaggcgggccggcgcgcgcgcgaggtggccttcatccacatccagcgcgagctgcggctgcgcggcgtcttcctgcgccacgagttcccgcgcgtctacgagcagctttgcgagttcgtcgaggccaacaggcgcttcacgcccaccaccatctaccccacggaccggcgcaccggccgccccttcatgtgcatgatcatggccgcctccgagccgcgcgcgctcgactgggtggccagcgccaacctgctggacgacatcatgtgaggcgccgggcccaccaggcctagcccaggcgctggcccgaaccctgccctgcccactcaggccccgcccggcccacccagggccgcccccgagccccgccagggccccaccccgacttcttctaggccccgcctctaattccccagccttccaagctccgctcagttcggcctccagctccgcccaggcccccaccccccggcccttcgtccccgtagtgttcctcacaggcccttcgccttcccacccccagcaacccctctccctcctccgggcctcctccctctcccagctcgccctcgaggatccccagaagaagtcggtcctcgccctcggtgctccccgctgggaggcggggtgggcctgaggaccgccgagctctgccttcactcggaggggtcactactgcacagaccccacccgtagagatccggtccccgtcggtccgcggggctctcgctggagcctccccgactccggtttcccctcgtccagaagcccgacgtaaccaaagcccagtctgtcactttaaacacgccccgccccgcctcccgcggctgtgttgcctcctcgctggagaacaccctggtcgacctctgtgcgtccgtgtgcgcgagcgcgtcccgccgaggcggtgggcagggcggacggtgcgcagtgcgttcccgctggtcggagccagcacactaaccacgccacgcgccctgccgtcccttcgcctccagccgctgcagtctgggccctgcaggagctgggaaaaaccgcagggaggtcttcaggccgatatgcaagtctcccagccgaaggggcaggggacctgaacaggggaagcagagcacctgggcctggccagagctgacacctggctaggagaggaaggaccaagggacggggcgttcccaggtgggagcctggagggcaaagcgtggtgcgagcaggtgagggagagagctagttggtaagcgtggaagcccacccgagggggcttgacctgtcccgagaggtccccgcacacccgctctggccgcacgccgtactgcgggcgtggaggcgcaagcccggcggcccggcctccacctgtcccccaagtgcaccctggtccgcgcccagagctctctggagggtggggtatgcgggagaggggtggaggccaaacgcaagggccctcctggagtccccagccctacttcggagccaggggagggggcaccaagtgagagaaattgggcacccccgcctccgctcctgctttcgcacccggcacgcccatctcgtccccgcgcgtctgcaccggccaggcgtcccgcttgcccacccgccgccgcgccccgcgccccctaccccagggcctctgcattcggccccacccctgagggccggccgggaacgcccctggaccggaataatttccagggggcaagagctttcgaaccaagtaaaatagaacttgaatgtagcggctgccgttgcctccttgtaccggtagcggggttggggacggaagccttcggtcggtggagaggagaaagggagaggccttcgggcggtggacggggaagagagggagtccttcgggcggtggagggggtggagagcgaggccttcgggcggtggagagcggggaggggggaggccttcgggcggtgggagggggagagagggaggcctttgggcggtgggggccacggggagggtggtcttcggactacgtgcgggacaggaggtcagggctggcaagtccctcaggcctccctcgttgccccagcctcgcgggccgcctaactgccccgttccaagggtgccaccggaccccgctggagaggaacttctccgttggctggatttcatcaccacccattcccgattccacgtttcctttaagcggggctggcggagccgcaaggcggcaaggaactggattgcgattggtcagcacgtgcctcggtcggcggtacaattggctgaggcgctgggccttgggaagcattccccgacgggattggtcgtcgctctcgcagagcccgcctcccgcagtacaagcggcccccgggtcgggtgggaggaggggactccgggaggaggaacatggcggtggcggacctcgctctcattcctgatgtggacatcgactccgacggcgtcttcaagtatgtgctgatccgagtccactcggctccccgctccggggctccggctgcagagagcaaggagatcgtgcgcggctacaagtgggctgagtaccatggtgagggcgggacctgcgggcatgccaggggcacgcctggcgaggcgggggcggggctggcgggacggagacggggctgacgaggcaggggcggggctggcggggcgggggcggggctgcgggccgtagcggactgcgctctgctccgagtcctgcccctgctaggtttgacccaggctgaggtcctgggcgggaagggcgtgacacggcctgacaccctccccagcagtctcccagttcccgcgccctccccggttccaccctccttcgctcattcatccctgtcccagcctcaaggggcttcgtctctcctggggaaggggctgttcagagctgggatttcagaccccttcggctgggagttcctcccgcggcctccaagggcggccagggcacgtcctgaggccgccctcccatcccagcggacatctacgacaaagtgtcgggcgacatgcagaagcaaggctgcgactgtgagtgtctgggcggcgggcgcatctccca

SEQ ID NO: 222 - DNA, 6000 bp, Homo sapiens
aaaaaaatacaaaaaattagctgggtgtggtggccggcgcctgtagtcccagctactcgggaggctgaggcagaatggcatgaacccgggaggcggagcttgcagtgagccgagatcgtgccactgcactccagcctgggtgacagagtgagactccatctcaaaaaaaaaaaaaaaaaaaaaaattggattctcagtccaaatagttccttggcttaatcatattctaaaatacccctttaaaaaaaaaaatatatatatatatatatatagttttttctgagatgcagtctcactttgttacccaggctggagtgcagtggcacgatttctgctcactgcaacctcctcctcccgggttcaagcaattctcctgcctcagcctcccaagtagctgtgattataggtgcacaccaccaagcctggctaatttttatatctttagtagagacgggagtctcaccatgttggccaggctggtctcgaactcttacctcaggtgatccgcctgactcggcctcccaaagtgctgggattacaggcgtgagccaccgcaccgggccatcatcttttcttcagaggtagctacagcagatgaaaagatttaaaaatcattttcacgtggcaagccatggtaaaatgtaactatttaaggctgctttaaattagactaatagcagagtggtcagactatactgaaagcttggtgaatcacaattaagtacctcaaagaactattcttgtttgccttattcctatgtaaataactgaaatctttgtttttcttcctaaaaggggtcatgttgatttttacttacaatgtattttaagtttgtcactctaaatggttatgagcaagtttaagaaaaatcttcagcaaatactaccttagattatgaccccaaaacacatttacgagcctcaacatcgttactgttaccgctttaacatttaaggcagtaaaaagcatactggatctctgtaaaggcgtaggggtgcggggaatccgttatgattatgttgaaaacatagggtctggggaaaaagggatttaaaataagaagaaaaagaagacttgggacttaaaaagtcttttagaggccagctcacggtgacaaaaaccgaccctcaccccgagccacgtgaggttttctgcttcctcccaggcccttccttccgcagtcagaaggcggaagaaaagttacctcaaggtggggcgagtggcagggcggaccctggcgacctgacgctgcggaggctcgagcggcgtatccataccacccagctgttcgccgcgggaacccgccggcccgcaggtgacccagcgctggaaaaacgccagcgacgtggcctggcgagctggcgcggggcaaggaccacccgcgcccgccttgccgccccagcctccctccctaggaagcagggtgcgccccggtgcgcgcggggcttccccggaccggcgttccagtccctctccggcttccggcccaccccggccccactgagagcagaaatgtgatctctgccctgagaaaatgctcgtggccagtgactacccctaacgcacaataatatggctccgatgggctcaaaggtattggttttttgttttgttttgagacaaggtctcactcggtcgcccaggctggagtgcaattgcgtgatcttgactcactgcaacctccgcttcccgggctcaagcgattctcctgcctcagcctcccaagtagctgggattacaggcatgcgccaccacgcccggctaattttgtattttcagtagacagggtttcaccatgttggccaggctggtctcgaactcctggcctcaaattatacgtccgcctcggcctcccaaggtgctggtattataggcgtgagccaccgcgcccggtccagtgttggttcttaaacgcgagaattgagatctcccttcacctaatgaaagtctcggccactatcgcaacattcagaacacccagtctgtgttgcacaatatgttacttaggtataaatcaaggattcatgtaattttgtcattccttgcgtgatattttaaaaaacattctgtgtaaggtatttataaagcgtttactattatccgcaatcacaggggcttgaggaaaaactttgactgtggccgggcaccgtggctcacgcctgtaatcccagcactttgggagaccgagccgggtggatcacttgaggtcagcagttcgagaccagcctggccaacatggtgaaacccccgtctcttctaaaaatacaaaaatttgtggggcgcgcttgtagtcccagctacttgggaggctgaggcaggaggaatcgcttgaactcgggaggcagagcttgcagtgagccgagatcgcgccactgcactccagcctgggcaacagagtagaactccgtctcaaaaaaaaaaaaaaaaaagaaagaaagaaaaaaaagtggactgtgaaaactgaaaggactagaaaaactacactacaaagatacagaaaccaagaaagcaccatagcgtttgccttcaactgcttcccaacttgttttcctcttccaatttgattgtggtttcctctccagaaggaactccacagtacttagcgttggccacatagtaggttctcaaatacttgttaataaataagtttgttcgagaagctgggcaatgatattctacagctggaagaagaaacataatgatctagtaattagctcattaaaaataaacgttcttctttcctcagaggagcatttcccaaggcctgccttgatagccatccaaaaaggccaagctcatccaatcttgccctagatttatgctaaaatgcagttacaatcgataggatgacagaaaacgacagcacttatttaaatataataggcacttatttaaataggagaagctgtgacttcatagcaagtgttggggttaggaaactgggtggataaacttgctgatgctgtagatcttagcctctacatgagatcatgtggaaaatctgaaagcattttaggttccttatgtttgcaatcaaataactgtacaccttttaatttaaaaagtaccatgaggcacacacacacactcgcaggaactttttggcgtaacaaaactagaattagatctaaagctaactgtaggactgagtctattctaaactgaaagcctggacatctggagtaccagggggagatgacgtgttacgggcttccataaaagcagctggctttgaatggaaggagccaagaggccagcacaggagcggattcgtcgctttcacggccatcgagccgaacctctcgcaagtccgtgagccgttaaggaggcccccagtcccgacccttcgccccaagcccctcggggtccccgggcctggtactccttgccacacgggaggggcgcggaagccggggcggaggaggagccaaccccgggctgggctgagacccgcagaggaagacgctctagggatttgtcccggactagcgagatggcaaggctgaggacgggaggctgattgagaggcgaaggtacaccctaatctcaatacaacctttggagctaagccagcaatggtagagggaagattctgcacgtcccttccaggcggcctccccgtcaccaccccccccaacccgccccgaccggagctgagagtaattcatacaaaaggactcgcccctgccttggggaatcccagggaccgtcgttaaactcccactaacgtagaacccagagatcgctgcgttcccgccccctcacccgcccgctctcgtcatcactgaggtggagaagagcatgcgtgaggctccggtgcccgtcagtgggcagagcgcacatcgcccacagtccccgagaagttggggggaggggtcggcaattgaaccggtgcctagagaaggtggcgcggggtaaactgggaaagtgatgtcgtgtactggctccgcctttttcccgagggtgggggagaaccgtatataagtgcagtagtcgccgtgaacgttctttttcgcaacgggtttgccgccagaacacaggtaagtgccgtgtgtggttcccgcgggcctggcctctttacgggttatggcccttgcgtgccttgaattacttccacgcccctggctgcagtacgtgattcttgatcccgagcttcgggttggaagtgggtgggagagttcgaggccttgcgcttaaggagccccttcgcctcgtgcttgagttgaggcctggcttgggcgctggggccgccgcgtgcgaatctggtggcaccttcgcgcctgtctcgctgctttcgataagtctctagccatttaaaatttttgatgacctgctgcgacgctttttttctggcaagatagtcttgtaaatgcgggccaagatctgcacactggtatttcggtttttggggccgcgggcggcgacggggcccgtgcgtcccagcgcacatgttcggcgaggcggggcctgcgagcgcggccaccgagaatcggacgggggtagtctcaagctggccggcctgctctggtgcctggcctcgcgccgccgtgtatcgccccgccctgggcggcaaggctggcccggtcggcaccagttgcgtgagcggaaagatggccgcttcccggccctgctgcagggagctcaaaatggaggacgcggcgctcgggagagcgggcgggtgagtcacccacacaaaggaaaagggcctttccgtcctcagccgtcgcttcatgtgactccacggagtaccgggcgccgtccaggcacctcgattagttctcgagcttttggagtacgtcgtctttaggttggggggaggggttttatgcgatggagtttccccacactgagtgggtggagactgaagttaggccagcttggcacttgatgtaattctccttggaatttgccctttttgagtttggatcttggttcattctcaagcctcagacagtggttcaaagtttttttcttccatttcaggtgtcgtgaaaactacccctaaaagccaaaatgggaaaggaaaagactcatatcaacattgtcgtcattggacacgtagattcgggcaagtccaccactactggccatctgatctataaatgcggtggcatcgacaaaagaaccattgaaaaatttgagaaggaggctgctgaggtatgtttaataccagaaagggaaagatcaactaaaatgagttttaccagcagaatcattaggtgatttccccagaactagtgagtggtttagatctgaatgctaatagttaagaccttacttatgaaataattttgcttttggtgacttctgtaatcgtattgctagtgagtagatttggatgttaatagttaagatccgacttataaaagtttgatttttggttgcttctgtaacccaaagtgactaaaatcactttggacttggagttgtaaagtggaaactgccaattaagggctggggacaaggaaattgaagctggagtttgtgttttagtaaccaagtaacgactcttaatccttacagatgggaaagggctccttcaagtatgcctgggtcttggataaactgaaagctgagcgtgaacgtggtatcaccattgatatctccttgtggaaatttgagaccagcaagtactatgtgactatcattgatgccccaggacacagagactttatcaaaaacatgattacagggacatctcaggttggtgggattaataattctaggtttctttatcccaaaaggcttgctttgtacactggttttgtcatttggagagttgacagggatatgtctttgctttctttaaaggctgactgtgctgtcctgattgttgctgctggtgttggtgaatttgaagctggtatctccaagaatgggcagacccgagagcatgcccttctggcttacacactgggtgtgaaacaactaattgtcggtgttaacaaaatggattccactgagccaccctacagccagaagagatatgaggaaattgt

SEQ ID NO: 223 - DNA, 6000 bp, Homo sapiens
agcaagggaagaaaatcatttccttcataccaagtaagagagcacttatcatggtaggcactggctttgcaattatgagaccagtagtagaaatagctttagtttcctcaattttcctggagtattcttcagactttctttacactgctaaaatgagagtaacatttcattgtataacctctgtacaatttcttaccatgtacatgtattacctacgtaaaaatgcttacaattacaaagataccaatgagtttattttctctactgactcaagttggtgtcacaggcataccaattaaggacaggcattctccaaaaagcatgtagaaacactgtcttttgtactaataaagagcccccatgtcttttcatgtcattgcatattagaattgtgacataggtgttaagtaggaacaaagaggcaacccatttcacagatgtactcagaactgctgggctgtcataggtctaagcagaagagcgaggactaaatccctaattttctgacaccgatgccactgatattttcattatatcaggctgcctcgacctgctggtaagggttaggactagctctctgacagattaccctggttccaatcctgctctgctgggccctaaggtaccatgaaaaaagatcaccaagctgtattaggtgaaaaaagcaaggtggcatattgtattttaccattttgtgcaaaaaaaggtaaaactttaaaaaagaatatatgtctatatgtgcttattacgcataaactgcctgttgcccattgctgctccatctatacaatgtgggtggtaggattacaataaatattgcaaatattagaacagtgcctgtcacactaaagtgtcattttatttggattctcggctgggcgtggtggctcatgcctgtaatcctagcactttgggaggccgagttgggcagatcacgaggtcaggagatcaagaccgtcctggctaacatggtgaaacccccatctctactaaaaaaaatacaaaaaattagctgggtgtggtggccggcgcctgtagtcccagctactcgggaggctgaggcagaatggcatgaacccgggaggcggagcttgcagtgagccgagatcgtgccactgcactccagcctgggtgacagagtgagactccatctcaaaaaaaaaaaaaaaaaaaaaaattggattctcagtccaaatagttccttggcttaatcatattctaaaatacccctttaaaaaaaaaaatatatatatatatatatatagttttttctgagatgcagtctcactttgttacccaggctggagtgcagtggcacgatttctgctcactgcaacctcctcctcccgggttcaagcaattctcctgcctcagcctcccaagtagctgtgattataggtgcacaccaccaagcctggctaatttttatatctttagtagagacgggagtctcaccatgttggccaggctggtctcgaactcttacctcaggtgatccgcctgactcggcctcccaaagtgctgggattacaggcgtgagccaccgcaccgggccatcatcttttcttcagaggtagctacagcagatgaaaagatttaaaaatcattttcacgtggcaagccatggtaaaatgtaactatttaaggctgctttaaattagactaatagcagagtggtcagactatactgaaagcttggtgaatcacaattaagtacctcaaagaactattcttgtttgccttattcctatgtaaataactgaaatctttgtttttcttcctaaaaggggtcatgttgatttttacttacaatgtattttaagtttgtcactctaaatggttatgagcaagtttaagaaaaatcttcagcaaatactaccttagattatgaccccaaaacacatttacgagcctcaacatcgttactgttaccgctttaacatttaaggcagtaaaaagcatactggatctctgtaaaggcgtaggggtgcggggaatccgttatgattatgttgaaaacatagggtctggggaaaaagggatttaaaataagaagaaaaagaagacttgggacttaaaaagtcttttagaggccagctcacggtgacaaaaaccgaccctcaccccgagccacgtgaggttttctgcttcctcccaggcccttccttccgcagtcagaaggcggaagaaaagttacctcaaggtggggcgagtggcagggcggaccctggcgacctgacgctgcggaggctcgagcggcgtatccataccacccagctgttcgccgcgggaacccgccggcccgcaggtgacccagcgctggaaaaacgccagcgacgtggcctggcgagctggcgcggggcaaggaccacccgcgcccgccttgccgccccagcctccctccctaggaagcagggtgcgccccggtgcgcgcggggcttccccggaccggcgttccagtccctctccggcttccggcccaccccggccccactgagagcagaaatgtgatctctgccctgagaaaatgctcgtggccagtgactacccctaacgcacaataatatggctccgatgggctcaaaggtattggttttttgttttgttttgagacaaggtctcactcggtcgcccaggctggagtgcaattgcgtgatcttgactcactgcaacctccgcttcccgggctcaagcgattctcctgcctcagcctcccaagtagctgggattacaggcatgcgccaccacgcccggctaattttgtattttcagtagacagggtttcaccatgttggccaggctggtctcgaactcctggcctcaaattatacgtccgcctcggcctcccaaggtgctggtattataggcgtgagccaccgcgcccggtccagtgttggttcttaaacgcgagaattgagatctcccttcacctaatgaaagtctcggccactatcgcaacattcagaacacccagtctgtgttgcacaatatgttacttaggtataaatcaaggattcatgtaattttgtcattccttgcgtgatattttaaaaaacattctgtgtaaggtatttataaagcgtttactattatccgcaatcacaggggcttgaggaaaaactttgactgtggccgggcaccgtggctcacgcctgtaatcccagcactttgggagaccgagccgggtggatcacttgaggtcagcagttcgagaccagcctggccaacatggtgaaacccccgtctcttctaaaaatacaaaaatttgtggggcgcgcttgtagtcccagctacttgggaggctgaggcaggaggaatcgcttgaactcgggaggcagagcttgcagtgagccgagatcgcgccactgcactccagcctgggcaacagagtagaactccgtctcaaaaaaaaaaaaaaaaaagaaagaaagaaaaaaaagtggactgtgaaaactgaaaggactagaaaaactacactacaaagatacagaaaccaagaaagcaccatagcgtttgccttcaactgcttcccaacttgttttcctcttccaatttgattgtggtttcctctccagaaggaactccacagtacttagcgttggccacatagtaggttctcaaatacttgttaataaataagtttgttcgagaagctgggcaatgatattctacagctggaagaagaaacataatgatctagtaattagctcattaaaaataaacgttcttctttcctcagaggagcatttcccaaggcctgccttgatagccatccaaaaaggccaagctcatccaatcttgccctagatttatgctaaaatgcagttacaatcgataggatgacagaaaacgacagcacttatttaaatataataggcacttatttaaataggagaagctgtgacttcatagcaagtgttggggttaggaaactgggtggataaacttgctgatgctgtagatcttagcctctacatgagatcatgtggaaaatctgaaagcattttaggttccttatgtttgcaatcaaataactgtacaccttttaatttaaaaagtaccatgaggcacacacacacactcgcaggaactttttggcgtaacaaaactagaattagatctaaagctaactgtaggactgagtctattctaaactgaaagcctggacatctggagtaccagggggagatgacgtgttacgggcttccataaaagcagctggctttgaatggaaggagccaagaggccagcacaggagcggattcgtcgctttcacggccatcgagccgaacctctcgcaagtccgtgagccgttaaggaggcccccagtcccgacccttcgccccaagcccctcggggtccccgggcctggtactccttgccacacgggaggggcgcggaagccggggcggaggaggagccaaccccgggctgggctgagacccgcagaggaagacgctctagggatttgtcccggactagcgagatggcaaggctgaggacgggaggctgattgagaggcgaaggtacaccctaatctcaatacaacctttggagctaagccagcaatggtagagggaagattctgcacgtcccttccaggcggcctccccgtcaccaccccccccaacccgccccgaccggagctgagagtaattcatacaaaaggactcgcccctgccttggggaatcccagggaccgtcgttaaactcccactaacgtagaacccagagatcgctgcgttcccgccccctcacccgcccgctctcgtcatcactgaggtggagaagagcatgcgtgaggctccggtgcccgtcagtgggcagagcgcacatcgcccacagtccccgagaagttggggggaggggtcggcaattgaaccggtgcctagagaaggtggcgcggggtaaactgggaaagtgatgtcgtgtactggctccgcctttttcccgagggtgggggagaaccgtatataagtgcagtagtcgccgtgaacgttctttttcgcaacgggtttgccgccagaacacaggtaagtgccgtgtgtggttcccgcgggcctggcctctttacgggttatggcccttgcgtgccttgaattacttccacgcccctggctgcagtacgtgattcttgatcccgagcttcgggttggaagtgggtgggagagttcgaggccttgcgcttaaggagccccttcgcctcgtgcttgagttgaggcctggcttgggcgctggggccgccgcgtgcgaatctggtggcaccttcgcgcctgtctcgctgctttcgataagtctctagccatttaaaatttttgatgacctgctgcgacgctttttttctggcaagatagtcttgtaaatgcgggccaagatctgcacactggtatttcggtttttggggccgcgggcggcgacggggcccgtgcgtcccagcgcacatgttcggcgaggcggggcctgcgagcgcggccaccgagaatcggacgggggtagtctcaagctggccggcctgctctggtgcctggcctcgcgccgccgtgtatcgccccgccctgggcggcaaggctggcccggtcggcaccagttgcgtgagcggaaagatggccgcttcccggccctgctgcagggagctcaaaatggaggacgcggcgctcgggagagcgggcgggtgagtcacccacacaaaggaaaagggcctttccgtcctcagccgtcgcttcatgtgactccacggagtaccgggcgccgtccaggcacctcgattagttctcgagcttttggagtacgtcgtctttaggttggggggaggggttttatgcgatggagtttccccacactgagtgggtggagactgaagttaggccagcttggcacttgatgtaattctccttggaatttgccctttttgagtttggatcttggttcattctcaagcctcagacagtggttcaaagtttttttcttccatttcaggtgtcgtgaaaactacccctaaaa

SEQ ID NO: 224 - DNA, 6000 bp, Homo sapiens
tttctctaagggcagccactataagacttcaaaagaaccttggtctccacagtgttttttcttaacctaaatatttcctttctatgatccctggtctttagacaaactcaaccaattttcaaccagaaaatgtttaaatttacctatagtctggaagcccccctttgagttgttccgtctttctggaccaaaccaatgtatttcttaaatgtatttgattgatgtctcatgcctcccaaaaatttataaaaccaagctgcaccccaactacctggggctcatgttctcaagacctcctgagggctgtgtcatgggccatggttactcatatttggcttagaataaatctcttcaaatattttacagagtttgatttttttcatcaacattagtaaagattttacttaagttatgtaaacttgaaaaagcatttgactattttattttttcctgaataagtgtttgatttaagcacttttattttcttacgccaattaattagagctcttttatatattttcagtagtgaaacattgtgtacacaacacataaatacatagacacattaggcatgctgatagaggtacatctttttttttttttttttgagacagagtttttctcttgtcacccaggctggagtgcaatggcatgatctcagctcactgcaacttctacccgctgggttcaagtgatacttctgcttcggcctcccgagtagctgggactacaggcatgtgccaccacgcctggctatttttgtatttttagtagagacaggtttcaccatgttgtccaggctggtctcgaactcttgaccttaggtgatctgcccacctcggcctcccagagtgttgggattacaggcgtgaaccactgcacctggcctagaggtacctcttatagattcataaaaaacgttttttttccttaggctttcagattctttttttcccctcctccctccccgctactttcagattcttgataacctgtttcacaaccctaggcagttgtcagctaaatagccttaaatttgcatattaaagaaaacaactcaggtgaactccaaacagcaaaatttacattataaagtgtggagagaaaaagtctggtgtgctagacggaaattgaaacagatttaatggccaattaaacataaaattatagaaattataaaagccttttaaatacacacacacacacatcctatagcttttacttcagaacttttagctatgagataaattcaaatttaccggtttgcaaaaagaacttgttggatctaaactgtggtttttatcttaacagaaaataatggcagatttagagcaggcagaaaagaatagagaaaagaggtcttaggaactctataattagtaggtcgaccttagggctcttttttcttaatgtaaatgtgcacaaagaccatattttttccattttacataaactttggcagtagaggtgccataaaacctacagagtgctcaaaagagggtcattctccttgttttcttctcattcttagattatttgttttccacttctttttttcttaaaaggagaaactgagctgtggcttagagtttctgtgtggtggatcatcacgtgctgcttgtgggcaggactccacaatgtgccaccactgaatggtttccaccctcttacatgtctcagtttctctctccagaggtttatgacttctgagagggctcacaacactgggtgatcagcccttcaatgtgtttcctggatgagccagtttttaaattaaatatatatatatatatttttttgagacaaggtcttactctgttgccccggctggagtgcagtggcataatcttggttcactgcaacctccactttctgggttcgggcaattcttacgtctcagtctcctaagcaactggggttacaggcacgcaccactacacctggctaatttttgtattattagtagagatgcggttttgctatgtttgtcaggcttggtcttgaactcatgacctcaagtgatctgcctgcctcggcctcctgaaatgctaggattatgtgtgtgtgaccgcacctggcctaaattaatttttgttggggatttccctgcaggaccactgcacatcgttcggggtcaacctttcagacactcccacaaggtccccagtcactcaggggcacctttcagttgggaggggcaaatgccctttctttttggagctgagaaaactcagtctctgatatacctatgaaagcaacagttcagttcctcatgcaaatgcacacagacaaacggaattgagattaatgttgggagaaaaagcaatataaaggatccttcagaacggatctccaaactagaattaggatttttttttttttttgagatggagtctcgctctgtcgcccaggctgagtgcagtggcacgatctcggcacagtgcaacttccacctccctggttcaagcaattgccctacctcagccttcgaatagctgggattacaggtgcacaccaccaggcccggctaatcttgaacttgtggggtcaagtggtccgcccgcctcagcctcccaaagtgctgggattacaggtgtgaaccaccgcacctggcctagaattaggattcttaaacaacgacttcctaggagagaaaattaaaaaaaaaaaaaaaaaaaaaaaaggaaacagccaaaaccacttcctataaactgtgctcagccacccgtaactttgtagctcttttccaacaatatacacaccaaggtcaaatcctctcacagtgcaaggtcatctctggcacccaaagccaaaaaggtcaggtcatgcaatacaggaaaacagagctttagacctaagaagaatctgcccatgactcttgaaatcccacaaagccaagagaacaccccaaaagggggtgagtggcacctttgttctaaattctttttttttttttgagatagagtcttgccctgtcacccaggctggagtgcaatggcacgatctcagctcactgcaacctccgcctcccaggttcaagtgattctcctgcctctgcctcctgagtagctgggattacaggcacgtgccaccatgcctggctaactttttttgtatctttagtcgagacagggtttcatcatgttggcgaggctgagtctcgaactcctgacctcgtgatccgcccacctcggcctcccaaagtgctgggattacaggcgtgaaccatggcgcccggcctaaattctttaaagaggttcaagtcattagaagccttctctcgattttttggtaatgcagatggcaaagggtgaaggaggtatagggtggaagaaaagtaaacaaaagaacaattgaattttttttttttttttttttaatttgagacagagtctcacactgtagctcaggctggagtgcaatggctcgatctccactcactgcaacctgcgcctcctggttcaagcaattctcctgcctcagcctcccgagtagctgggattacaggcacccgccaccatgcccggctaattttttttgtattttcagtagagacagggtttcactatgttggccaggctggccttgaactcctgacctcgtgatccgcccgcctcggcctcccaaagtgctaggattacaggtgtgagccaccgcgcccggcctaagaacagtttaatttttaagaccaggaagcaaacacagaaaccaaatacatggttttttgttttctgtttgttttttcttttgcagctgtgaggaattttactcaaattagataggccttgttacccataatttggaattctcacttggatttgaccaagtgaagtagagttggtcaatgggaaaaagacaaacaaaataaaaaaaaacccaacaatatgatcactgagcactctaatggtaagcagaaattaagaccagctggttgttaactttagccaagacaaaaatccctattcagctacttacctaggggtgcgtctcaggctgaaaacggctgtctaccatcccagaagtaggaaaaaaacccctcatcttccctgttggaagtgagctcaaactccataaaagagttacctgccttccctcgtcatggaagcaggaaaacttgccttccttgttggaagcaagtaaaactccaaaataataataataataataataataataataataatagagggagttgtacaacaaaatgaactttagatctcgaccaaattttgggagatcagggattctctggagggggtgctcctagaccttagcaaattgtcctgttggtttgagccatggagttagctcatgttggtaccaagcatggataggagatttgtcaaagatcagaggtatctccactcacaatccctccgtggttaccatccttcattcagtaaatatttacggactgattaccatacactaggcactattccagacattggagatacaatgatgagcataaaaaacggtctagataagaactgaggtctccagacatactttatgcccactcagttttgtcttttgccctagttgctaaacaaaacttaactttgctgtgcggtgcgacttcgttaacttaaaattacaggctgtcagctatgaccgctagactctaagaaagtccagtggaaatccttcaatgaaaagaatctgttcttgggtggaagccccgctcatgcaggaggaacagagggcttccattctcgcgtcacacaactgagggtcaaccccttgctccctgcagtaagcctgattagtgggcggagcttccttcaggatcgcaagaaagaaaggaggaaggggaccccgcctcctacgtgctcgcgggggggggcggggtcggtggactgggcgtgagttaattggctggggggcggggcaccacgggttggctccgcccaggcgctcgcgcggatcccgggtggaatgacgggagggagtcccggcagctcctacctcccagcgatggcgtcgctgtgccgcgcccagtccccagcctgccggccggtactcaccgctacccggagttcgctcagacggtgagatttggggcgggtccgaggcagcggcgggacgctacctgcgaccgggaccatgaggagctgccagacccgtggggccggtaacgagagcagtcgcggcacctgctgagaggaaagagggagcggtccggcgcggctggggcgcggcagaggcttgcccgatcctcggccatgtcactgctctgcgtgcgcggtgagtgcgcggactgaggcggggaggcggggtgtcggcgtagaggtccccgcacccttccagtggacgtccggtgaccgtctcacccaaactttacatcccgtccgtgctttgggggtctattattttggcaatcacttaacaatcacttgagttctttccactttcttgttttcccccaagctcctgcaagggacgattagctctccattctggtagccatgtgacaatgttgttggactgcaggctcagatcctattaaacagtgactggggttctctagtgagagtggacgagttagaagaccgcggatggttggtgcctgtgaatggtgggcagcctctcattcttttcctcctcctcgcaccgtaacgctacagtatgcttagtagcaggttctttttatcacactttgaatgcgttagtggtacagctgtcacatcccttctattgcttgtcttgtcccctgccacttccctgaacactaaccggtagtataggctaagattattcttctgttccacttgggaggatgtggtgactgcttttgaggataagaggtatgatttatttttatttttattttagcttgcctcacagtaactcaaggtgaagggccattattgcttttcccctgaggacacttgacccatctaagaagatatcttaaagcaagagctttggggtttaagatgaggcatggtacgcgaactaagttctatgtgggtagagactgtttcttattagtttttg

SEQ ID NO: 225 - DNA, 6000 bp, Homo sapiens
caggtgcatgccacaccacacccaggtaatttttgtattttttgtagagacagagtttcaagatattgtccaggctggtctctaactcctgaactcatgggatctgcctgccttggcctcccaaactgctggaattataggcatgagccaccgtacctggccaatcccagcactttggaaggctgaggtggtaggactgcttgagcctgggagtttgagaccagtctgggcaatatggggagaccctgtctctataaaacattaaaaaattagctgaatgtggtggcatgagcctacagtcgcagctactggggggcatggggaggaggttgaggcagaaggatcacttgaacccatgagtttgaggctgcagtgagctctgcactccagcctgggtgagaaagggaaactctgtcttggaaaaaaaaaggggggcgggagcagaaaatattagaatcaaatattaaacctcctagagcaagctgtttcacgattcaaaagtatataagagaagcagagaaaacaaagaatatacaaatgcattattccaaagacaatgcactctctccattagaaaaaattaccatatacaactccagtaacaacataatacaaatttcaaagccacatttgaaactatcagtaaaatgcaaaatatgtactgtcttcactgaaaagaaaagaatgtcttcttggccaggcatcgtggctcatgcctgtaattccaacacgttgggaggccagggcaggtgggctgcttgagcccaggagtttgagaacagcctgggcaatatggcaaaacttcatctctacaaaaaaaaaaaaaaaaaaaaaaaaaaaaaaaaaaaaaaagaagcgaggtgcttttagtcccagctagttgtgaggctgagatgcgaggatctcttgagccagggaggtcaaggctgcagtgagcctgggcaacagactgagactctgtctcagaaaaaaaggaaaaacaaacaaacaaaaaagaatgtcctctcccagctactcttaaagttggcaatgatagccctgaagggaaaacaaatgtgaaattgtaagtctaaatttttaaagaaaactaaaatgttctctcaataaacaacttttaccataagatagcagctctcatacataaggcaatattctgaaagataaacacaatacaattcaaaataggctaaatttgttactttacacaaaaagaaacttcctagaatgtctgcaaaacaaatacactttgctcttacttgactccattttataaacaagtgtgcttgcaaatctgccaaattaactcaatttacccttactacaatttcagacttcaataatccatctcatcaattgtacctttcatctatgtcttaataaattttaatggtagagacaagctgctctatactttgataacagtcttactttctgttatgaaacaaaactgtaccctttggccaatgtgatttttaggtttaacataaatttggtttcttcattttcttttctcatttagcaaagaagcttgaagagggaagcctttcatcacttaaataaaatgaatataataaattctggctagacaattccattacaaaaggtagctatgcagtagtctccagccttgacacaggagacattcatttcacattattttagtaatgtatataaagtcaatttttctaaaaaagcaaatactttgacttaaatgccagtgttgaaaaagagttagaatttttgctttcaatgtattctccttaaaacaatggaaatggagctaattctcacataagtatatataactatcttttcataaagaagctcagttgaagttgattagctttcagtttccatccatttgagacaaaacatgttattttctctattgcattaggtaataatttttactgtaacttgctcaatctgcacttactacataaatacaatacagcagctgggtgcggtggctcacacctgtaattcccgcaatttcgggggccgaggcaggtggatcacatgaggccaggagtttgagaccaatctggccaacatggcgaaaccctgcctctgctaaaaaaatacaaaaaaattagctgggtgtggtggtgcgtacctgtaatgccagcttcttgggaggctgaggcaggagaaatcacttgaagctgggaggtggaggttgcagtgaccaaggttgagccattgcactctaggctgggtgacagtgcgagactccatctcactcacacacacacacacacacacaccatacactgtattacagtaactagtacattcttatatatgtcagtttatatctattggagtttaccacaagcatatggccactgggattttttttcagaattactctttgccattaaacagaagatactttccttatacaagatgaaacaatgttttaatacagtatcattaaatgtcaataatgaaatatttaacttcaagaacaacaaatttaaaaattataccttgctgttattttttaataaattgaactaggcagggtgtggtggctcatgcctataatcccagtgctttggaaggccccagatagaaggattgcttgaggtggctcatgcctgtaatcccagtgctatggaaggccctagatggaaggatagcttgaggccaggagttcaagaccagccttggcaacacagactcgtttctacaaaaaataaaaacaattagctgggcatggtggtgtgatggctactcaggaagctgaggtgggaggactgtttgagcccaggatttcgaggttgcagtgagctgtgatcgcaccactgtacttcatcatgggtgacagagtgagacctggtctcttaaaaaaaaaaaaaaaaagaacgaaagaagaatctattgtagggggaggggtggttactgtaaaattttgtactcgagcaattcaattctccaaaggtgggttgtttcttccccaaaggtaggttgttactataaagagaaaaaggtggttctttaataaagaaatcttcttaaaaacaactgaagtgtctcttacaatgattacaggattaaaaaaaaaagcaagttgggaattatgaaaagccactagggaagtcatggtgattaaaaagaaaggttttggagacagatctaggttcaaattcctggtcgtgctattcagagaaacttgtgaggttgggtaagtttcttcaccccttttagcctcaatttccttatctgcaaaattagtcactgtgttaaataagaaatagcaaacagaggtattattagcactgagcctggtatgggcccaataaggcagctattaccattactgtgaagacaagctgaccagggacctcattaataacgttgcaaaagctgctacggtcgttttcctttaaaactcaggctgggcacggcgactgacacctgtaatcccagcactttgggaggccgaactgggcggatcgcttgaggctgggagttcgagaccagcctgaccaacatggcgaaactccgtctctactaaaaaatataaaaattagccaggtgtggtggtgcgcggctataatcccagctactggagaggctgaggcaggagaatcacttgaacctgggaggcggaggttgcagtgagccgggatcacgccactgcattccagcctaggcgacagaccagactttgtctcaaaaaaaaaaaaaaaaaaaagacaaaaatccactctttgcttttttagtagggtaacaactattggtaactttctcttgttcgatattagtgtaaaggactccacagaaataagaacaaaaagggtagagttaaaaaccgaattttacaggtagcaataacctggactcaggtaaaagtgcgtgatgaagaattgatcaaagggccttcatcctagctttcaactattctaccaatcctcagtagacttgatgggggttagaatggtattccctggcatatgcttttaaaacaaaatcatttcaggcaaaagaaaagtctagcacccaggatagtacacatactaggcaggattaatcttaataattacttgttgaatcaagaagttgtacatttcagatgaaaattttaatttcctaggaaacaccgacttacattgaacaaaattttcatttgctattattctggactcaccgagagctcaagattctagtttttatcttcacttatttcaaaaaccttatgcggtaggaattatccccaaagtaatgaaaaaaaggaatgagctttaaaagcggttgagtaaactgcctaaagttaacagtttctaaagtaaagaagcagctgagatttgaacttgctttttagggctcaaaaatccaagctgtctgagcttcactaaagcatgtaccactacttgtctccctaaactgtctgatacacagaacatttattaaattttaaggatttttgtttttgtcttctatgttgccagtccttccatttcacattacctcctttgctgggtaagctatataccctcaatacaacgagaatggtgtcagagtacaagccttaagaacagaaaatttcttttactccgtacgccagaggtctggcgccaccaccacaagcgacaaacacaggctggggtccagaaacgctgccgaccgcgcccagatctcaagttttagtcaaggcccacgttcagactaggagaggggagaagagagggttctctttccccacaccctcgccacggtggaagcacagaggagaaggttggagtcgcagtaacagtgcaaacaataaacccgaaagcccctcttaagcccgttaaacgcacttacttgattgaagtaattccaggacgctaggccggcaccggcaacggaaaaggcttctctgtcctccagcccaggcgctggtgctgacgacatctggactgcgccgcagagagtgaaggcccagcgcgaggccgcgagcccagcgcccagagcgcgcgctcacgaaaggagcggggcatcccaacggcgccacctttaagcgtcacgggtggggctgcagcttctggacctaggactttgaacatgtcgcgcctgaagcggatagcggggcaggatctccgcgctggtttcaaagcaggtggaagagactgcggtacctcggtaccccaagggctgttgaaggcagcgaggaagagcggccagttaaacctgtcgggtagaaacctcagtgaaggtaagacccagaggtacgaccctattgtgtctcctgtcagaaagcctttggcccaggcaacctcccttttctctgggctggctttggccccctttctcagactgctagccagaatttctgtgctctaatctaatccctgtgctcatttcgaccggtttggttagcccagttcagttccttcccaggttcccgcaatctctgttaaagggaccctgctaaaaatacggtctaaatttaaacggggcgctttctgggattcccacattctgtgggataagcaacataatatgtgacgaaaccagctatcaaatcacgggcaaatcttttgtttctttggcccttattttcctcctcttattgtaatcttcaagggcaattaccaaagctaaaattatatgttttatcggcccctttgtgaacctgcactgttccctgccgagacgctcttctgtatgcagctgtgcagagttctacttacaaggaataatgagtatattttctaagttgaagatcaggatagatgccacacagagtgtttgaatgtggggacatcctgagaaacctgttaaagaccaagaagcacaaatctgggtaccatgaatgaatggccagatgctcttctgattgtcgtgtgtgtgtgtgtgtgtgtgtgtgtgtaagagagagagggaggggaatggagagatggagaaatagagcatttttcctgtaatgtttttcttcatttatatttaggttttaagactgattaaaaccttccattttccttctaatgattgctttcttattgtgacatg

SEQ ID NO: 226 - DNA, 6000 bp, Homo sapiens
agtaaacaccagctacttcctcctgggtggttacttccttctggtcactgggttcctggacggctcgaggaagcaggggcttacatgggcatgcagggcagacccctcaacacctctcatgcctgtactagatgcagggaaggtacacaggctgtataaagctggccctgaccacaggacatcactgtttaatctaagagacctcaggaactgcagatgtcaacaaaccatttacgaagggtttcagggaattaggagccaccagagacagccccaacatttccatgtaggaggcccttgggaagaactgaagctatatctatttacataaactataaacattgtccagactgaagatggaggtactaagagagatgagataaagccccattgcctagttctcctcagctcatggccctaggaatgaggggagaagggtttgttcacgaaataaaaagcatttcagcagggtcttgagagagtcagtggggaagaggggcctgggggaggtctagagagtcaagagggttttagggttgattctggaggctctagggatccttggaaggcttgggccacttcctaagcctggtcgggtagacagagactcagggccctccaggggaccctcctgagacattgctgttggctttgaggcctccatactttaccactctcactggggactcaggcctgtgtctgtgcagcctcctcagagggccatattctggacccggccagaccgaggcaggggccaggccagtttatcccctaatatactaaaaagctcagtgcctgggcctgcctgcttgagaggcctgtgaaatgtttgtggcctaagaaaaatgtattggctctaaaacccaagaaaaacagcaaaattagaattaatgaacatctaattaaatgtctacaaatgtaacatgtcacctttatagtcatcataaaaatgtcataacagagctgggcaccttggctcatgccttaatcccagcactctgggaggccaaggtgggaggatcacttgagaccaggagtttgagaccagcctgggcaacatagcagagacctatctctacaaaaaatacaaaaattagctgagcgtggtgctgcgcacacctgtggttccagctactcaggaggctgaggtgggaggattgcctgagcccaggagggggaggttgcagtgagttgaggtagcgtcaccgcactccagcctgggtgacacaatgagacccatctccaaaaaaaaaaaaaaaaaaaaggtcattacatttgagaacaatttctaggttaggtttctctcacttggccaaaattcccacacagacacgatgattgccaagaaatcagccaattaaaaatgaaaatgaaaactcataattagataatatcaagagcacaattatggatattcctgaaaacattttcatagcaaaaattatgtatatgtttactacgggatgtagagcattttaatatgtttgatatgatgtcaggtgtggcctccagaaggaagagggcagtggcttacaagcattttatttatttttattattattattattttgagacagagccttgctctgttacccaggctggagtgcagtggcacgatcttggttcactgcaacctcctcctcccagactcaagcgattctcctgcctcggcctcctgagtagctgggattacaggcacgtgccaccgtgcctggctcatttttgtatttttagtagagattggttttcaccatgttgcccaggcaggtctcaaactcctgaccttgtgatctgccctccttggcctcccaaagtgctgggattacaggcgtgagccaccacactcagccctgcaagcattttaaaatggccccagctcatctgtgctgggtgaccagggaaggattggaggctcaggtgtaggggagtcaggctgaagtccagcttgcccactgaggggcacagacagcaggtacggttctgcatgccaggccctggcggatacagcagtgaacaaaccaatcattctcctaccctcgtggagattatattctagtaaggcagggaggtgacacacaagaaagcagataaaagtaatgtgtgctatgttgtataaatgccgtgatgacatgtagatgattaccgcttaaaacagcacccctgtcccgtcccatctgcctagccctggccagccagcccagactcttagtccaggaggggggctcgtggcttgtgcctgtgaaggatgccttcctcgggcctagcagacatcggcccccgtgagacacctcatggggcttggtcctgtccactgggaccacaggtcatggccacccccacttccttataacttactgatagatctaggagagatgggctacaccctcccctgtcctgttgcctccctgtaccatggcaatacagaccgggttctcccagctcttccctttcccacagtatttcaaggtcagacctcaccctgactgcctaccccacaagccaattagtcacagccccttttacatacatggtgaggcccaaattgaacttgggaccccttgctcccgagagcagcccactccactcccgcagcaccgcagtgtctggcctcccttgtctgggcccggtctgactgttggattccccctctccgaatctgctgactgatgaggaagacatcggtgttaactgcaagatgataataataacagctgatatgtgctgagtgcttactatgtgtgaggcaccgtgctaagcactttcatatgcatttctcacgtaaccctttcaataacaacagcacgagatagctacttgtatttatcaaccctgttttataaatgaagagactgaggcccagagaggttaaatcacttgcccaaggtcatgcctctggtaagtggcagagctaggagacacatctggtcagtgtgaagtcagagcccagtccttaacactgtgctgattgtgctcaaagacaggtggagaggtcagccacacctctgatgggccccaggaaaggaatgcttgcgtggtgccactttagggcctgcagagagtcggcaggctgggtgaggacccagaacctgcccttcctacctgggtggctccaaacaggcagtctaatttgtgtccctgtccagctcagaaaggtcagttttccacctgggtctttcagtgtgtctgtataaaacatgcaaatctatgagggtgagatatttggtttgggctttcacaaatgtagctatgtagctatacacttcctttttcctttgaataaagtgagctcttgtactcactattccctctccctggaatgcttcacccacatttctggttgcccctgtccctcccatcatctgggtttgtgctccatgtcacaggatcagaccagcctccttgcctgtcctggggcagcagcctgctatctgccccccatcacttcatcctctcactttgctttttacttattttttattcttgtgggaacatagtaggtgtatatatttatgggttacatgagatattttaatacaggcatgcaatgcataataatcaaatcagggtaagtaaggtatccatcacctcaagcatttatcctttgtgttacaaacaatcctattatacttttttttttctttttagacagagttttgctcttgttgcccaggctggagtgcaatggcgcaacctcggctcactgcaacctccacctccggggttcaagagattctcttgcttcagcctcccgagtagctgggattacaggcatgcaccaccacgcccagctaattttgtatttttagtagagacagggtttcttcatgttggtcaggctggtctcgaactcccgacctcaggtgatccacccacctcggcctcccaaactgctgggattacaggcgtgaaccaccgcgtctgtattatactcttttggttatttttaaacgtacaattatattatttttgactgtagtcaccctgttgtgctagcaaatacttggtcttattcattctttctctttgctttattacaaagcaatagatttgccttctcaggttgtgagtgttcaaataagttagtctataaagcactgataaatactaggtgctattttaagcggtaatcatttacatgtcatcacggcatttatacaacatagcacacattacttttatctgctttcttgtgtgtcacctccctgccttactagaatataacctccacgagggcaggagaatgattggtttgttcactgctgtatccgccagggcctggcatacagaaccgtacccggcattcagaaggcgctcaataaatatatgttgaattcaataaatgaactgaggtctggagaggcaggaaacgctttggctttcatgaattctgcaaatatttactgagcacccactcagcaccaggcaataggctgtctcatttttacaatattagcttgagactctggcaggagggagatttaaatatcaagtttttagaataagatacacagtgtgaaatgcagttttaagcggacactccgctgggttttgagagatgcacactcccatgtacctacactgccataaagaaatagaccattgcttcatccggcagggcgaggacttggagcccaggtggcacgaaggcaactgacccgcggggtgctggtcgcaggaccctgcctccgggggctgagggggcaacggccggcgggcgggcgggggcgagactacaagtcccagggtgctttgcgcgcccgcgggccgtgcggagcgaaggggcggtgcggagggggtagggggcgcagcggccgcggcgcggaggcgcagggcgcgggcgcctacggttggcgcgcggtagcgatgccgggggccggagcccgggcggaggagggcggcggcggcggcgagggcgcggcgcagggggcggccgcggagcccggggcgggtccggcgcgggagccagcgcggctgtgtggctatctgcagaagctgtcgggcaagggccccctgcgtggctaccgcagccgctggttcgtgttcgacgcgcgccgctgctacctttactatttcaagagtccgcaggacgcgctgcccctcggccacttggacatcgcggacgcctgcttcagctaccagggccccgacgaggcggcggagccgggcacggagccgcccgcgcacttccaggtgcacagcgcgggagccgtcacggtgctcaaggtgggaccgctcgccccaaagccgcccgcgcgcttccgccggcgtcccctgcctccgccactggcttgcgccatccaccctccttcctccaaggcctcctcgcccctgcccacgtcggcctgcctttccctgcttctccacatcccgccctcgttcctatctcctccccactatctgggcttaggccagtctcgctggggctaccaagccccgtctcctttctcagacaccttgacccattatctccctctgcgcctaacctcgggccagtctctggtgtctcccgacccccaccatcccgtggatgtcctgtgcagccttcccaggcatccgtgagcgtaggcttctacccctggggcctcctttagaactttgcctatggccttggtacctcagtgaaccgctctgggctgcagcggcctcctctgtaaaatgggataacagtagtatctacctcatggggtgttgggattaaatgaattatactttaaactgctcagtaaatgtcagtgcttttatttatttgtttatttattctttttgagacaggatcttgttctgttgtccaggctggagtgcaggggtgcgatctcggctcactgcagcctccatgcctgggctcaagagatcctcccacctcagcctcccaagtagctgggaccacaggtgcgggccaccacgcctggctaattaaatttttttttttttttaaagaaacgggggtctcactatgttgcccaggctagtctcgaactcctgggccgaaaccatcctccc

SEQ ID NO: 227 - DNA, 6000 bp, Homo sapiens
tttgcctattcagctctctctactccttggttttgctgataaagaggtcagaaatgggtaattaatcagcagcatcataattagaaacaatcataagtatttaagtgcgtttcaacttatgaccttgcaagcatcaagaaaaaactctgtagtcacgttactaacgcgccacaaccttttcctattgttcctattgcataattgttctccttccctacccgtgtagcctttcaggttaacttttaggtaaaattgacttcttattaaaaatgaaagatctggaccaatggatttccaaggcccttttctttctctgtgatctatgttattctaaggaattattgcaagtcattctgagaataacaagataatcgattttttaaaattaagatgcattcgatttgcagaacatttaacgtaatgaagcgattaaaccaagtatactggatattgtcttttatctgagaaacaataaactagatgatcttggaccttgcattgtgttttctgaatgctgacggtgatttaaaagataccccgtccccgctcccccattttcagtgtagactcatagtgcagcttcctgaaaattcataacttattgtgatgatttcttgctagctactgtcctgaattcagttaaccaaagtccctcatctgctgatactttaaaacagttctataatgacagaatcagttcagttctgtggctcctcttttcttaaataaatctgcatgtctcctttaactgttccacatatgaggtgggctcttcactattctagttgttctgggaacatggcctggtttgtcttgtcaccccaaaataatcaaaaggctaaggatccagttaaaaaggtttattcaactgtaaagtgtaagggcagtcatatgggaacatgtagacaccaaagaatgctgatcagtgcttccagcgtaaggaaaattgaagatggtttatataagacaaaatggagatgccaaacagaattacaacattttccaaacaatggataacatccagatttaagatctgattggctagtattgattacactctaaggtggttgcttaatattctatcgtaaaaaagtaacaatcacaagggtctacagctctaatattatgtagtccaggtttgaaacgaagaatagggagtctgattaatgtataacatctcaacacaaaggtcgggaagcaacaatagtcatgcaccagagaagaaaaacagctgtattacatgactcagttttcaaggcttaactttgcccccttggcttaataaatttggaaggttctgaaatttcattgtctttttaaagtttgcatctcaaagtataagtcgcagaactgaacaggaaattccagcatgttcatcatgtaagttcacagagctatgtagtaggcagaataatggcctccagaagataactgttgagattccggaacctctgactatgttatatatgacaagaggctttgaagatgtcattaaattaagtattttgagatgggaagattatcctggattgtgtgctggactcagtgtaatcacaaggatccttataagtgaaagaaggaagcagagtcagggagaagtttgaagatgttctgctgctggctttgaagatggaggaagatggaggaaggggccacaaaccaagcaagcctcctctagaaattggaaacggtgaggaaatgatttcttccctagagcatccagaaggaatgcacccttgccaacacttgattttagctcagtgaaactcaatttggacttctgacttacaaaatgctacctgtttttggctccttccattttcttttccttttttttttttttttttttttttttttgagaaggagtctcctactgtcgcccaggctggagtgcagtggcatgatctcagctcactgcaagctccgcctccctgatctcagctcactgcaagctccgcctcccgtgttcacgccgttctcctgcctcggcctcctgattatctgggactacaggcgcctgccaccacgcccagcgaattttttatatttttagtaaagacggggtttgaccatgttagccaggatggtctcaatctcctgacctcgtgatccgcctgccttggcctcccaaagtgctgggattacaggcgtgagccaccgcacctggcccaactccttccattttcaaagccaataatggagcttttttttttttttcgagacagagtcttaccctgttgccaaggctgcaatggcatgatctcggctcactgcaacctccgcctcacaggttcaaacgattctcctgcctcagcctcccgagtagctgggattacaggctcctgccaccatgcccaactatttttggtatttttagtagagacagggtttcaccatgttggccaggctggtctcaaacgcctgacctcatgatagcccacctcggcctcccaaagtgctgggattacagtcgtgagtcaccacacccggccgagcattttcaaatctcagactctcacctctgcctctgtggtcacatctccttctcttactctcactcttctgtgtctctctttcacttacaagggctgttgtgattactttgggcccacctagataatgcaggaacctccctattccaagatccttaacttaatcacatctacaaaatcccacttaccatgtaaagtaacatattcacaggctccagggattaggacatgggcatcttctgcctagcacactgagtttgcgtgatgccagtcaataaggttgaaatggaaagaaatgaggtagaagcagcagcaatgggcctgatcacacagggccctataagccaaggtaaggatgttggattttattctgtgatgttatacactagcatattaccagcaggagagtgacattatgatttatattttataaagatcattttgggtgctgtgtggcaaattaactacaatggaagcagataggttatccaactaggagcctttcaaagtactccaggaaagagatgttagtagcttggattagagtagtggagatagaggagataagtgattagatccttggtgatgtgtgttgaaagtacagagagaaggtttaaggatgatttcaaggctttttggctggagtgactgggtgaatggtggtacagcagatacagaatcctgcaaaaggaggttttggtttgtttgttgtggagggagtcaaaataaaattgcagtgcctggtagccatctaagtggaggtggtcaataggctgtaatgtatgtcacagaccagtctggaattaagggaagaggtaggtcaagagacaaatacttgagagtcactactctatagatggtaaagccttcagatggaatgaaagctgaccatgttatttattatccaaaccagcacacatttttttattttgacaatttcagacacataaaagttgcaagaataatacatagaatttgcatatgcctttcagtcagattctccaaatgttaacattttattgtaattgctttatccttttctatttctctaattacctatagacagacactttttctctgaactatttgaaagtaagttgcggacatgatacccatagccttaaatacttcagtgggtttttcctacaaagacattcccttgtatcagtagttcttaaagtatggttcccgggccagcagcaactgtatcacctggaaagttagaaacctaacttgtagggccccaccccagatcaactgattttgacaatttttctgtggttatgaaaggaaattaacatgacttcaaaactattatctaatttataggcattatttagattttacgaattgtcccagtaatgtctttgatagcaaaagtaccaaatggacacttttgagattaaaggcaaccacattcaataattttgccaagacaagggtagtaatgtaatcataaaaggcagctgagctcacatctgtaatcccagcactttgggaggctgaggcgggtggaacacctgaggtcagaagtttgagaacagcctggccagcatggggaaaccctgtctctactaaaaatacaaaaattagccaggtgtggtggtgcgcgcctgtagtcctagctacttgggaggctgaggcatgagaatcactcgaactcgggaggcagaggttgcaatgagccgagattgtgccactgcagtcgagcctgggcgacagagcaagaatctatctaaaaaaaaaaaaggcattgaggaggtatactttttcttaatacgtacacttagaggtctggtatgataactgtaattgtctataggattttataaatggatgtccttagtgaccttgacaagagggaaatggactcaaaaatgaaagataagaaagcagacatggtatgtagaaaacttctttataaaacgagcaaagatacggagggggatgtgggattaaggaaggtttttttttttaaagtgggtcattttattaatacattatgttgattgctgctgggaaaaattctttgcagagcagtctagggaggtttacaaactactgatgcctggggctcatctccaaagattcttatttaatggatctgggctgcagccaggttcacggggatttttaaaagctccccaagtgatcttaatgtgtagtcaagattgagaaccactggtagagagagaaaaaaactctgttgaagagaggacttaaaatctgctgcagcagcaagaccttaaataatctaagtgctaagttgcagccagcaccacttaaattatcaaatcttgtcagttacagtatccaactttccctacaagcatccataggcagacgaagggtttataccagtaactgcattccccaggagacaagaaaggaggatagaaaaacgacttaggaatctccttggagctcaagaccaggaacttccccaagccggaggtccctgaggcgctctagcgcgctggccgcactcgcagcccaggtcgccagtgcgcacgcgcaagattaggtggggcgccagagccggggcacctgcgcaggcttggctgcgccctctcgcgccgcacgctctgcgggttcctcccttcttccgagcctctcctctggccgccgcgcgggagagaggccgagatggcagatgagattgccaaggctcaggtcgctcggcctggtggcgacacgatctttgggaagatcatccgcaaggaaataccagccaaaatcatttttgaggatgaccgggtaggtactgggcaccacctctctcgcctgctgaggtgggtatcgtccgcggatcctcgggtttctcgcggagggagaggaggggtcgcgagtgtagcggcgacgggaggggacctggctgccctggtccagcgggcccccagccagcggacagggcccgggcactccgaggcggcctgccggcgcgtgccggcgctccggttactcgttatctgccccgggcgcgggccaggccgccgggcgccctgagtgccgcaccgcggggcctgggcgcgtgtcggggcgcactggggcccccgcgtggaagcccgccggttccccggctgcctcggaccttgcctgtatcaggaatctcgaaatctcgccagcgctctgcctgacagagagaaacccgatcgcgccctgactcaggcccaatctccgcgatctcccgcgcacagccggcctgccagggcccggcgttcctgggcgctgctcagcaaggcattgtgctcgagggccccaggggcgctgggaggtgcgcgggccgtctgggcctgccggcttcctccgcggggtgcggcttgccaccctcacccctacccctatccctatctccaccccaaggcctaccctgggctagcgaggcgatctcctgagataagaagtgggcccgcgtctgggatttgctttccgttgacctctcccgctgaacattttggacttacaaacagctgaatgattctttttgtattcaacaggaagtaatttt

SEQ ID NO: 228 - DNA, 6000 bp, Homo sapiens
cccgccccgtcccataccggcctgcgcctgcgccggacgctccgcggccccgcctccggacccggggctgggcggggcgccggtgctagtggaacgccgagccagtggcggctggtatcccgcggcggctctggaagctggacgcggaccacggcccgggagctagaaactgaacgcccgcataataaagactggaaccctcgttctcagctctcaccaagtggactttttgcggggtgtggcggccgggtctcgaccacagcgtggatcaccggctgtttaggaaactgcagctgcacaacgtggggtgcaaaactgccccgcttcctttacagctcttctcaaccctcacctccatcccccgtcacccaggcaccttcgcttccagatgctgccaggctgtcactcaattcggtcatttcattcatttatcacacatgggcactggggttgggctaacagcaagagacaataggcctttgttcctatttattgggtactgcttacgtgctaagcagatcagtttatttaatgcttgcaacgactctctgaggtagaaaatattgttaattccgttcaggatcccggctacataatctgtggggctcaatacaaaataaaaatgtaggggctccttgttcaaaatcgtatgaagaatttcaaaacagggacaacagagcatgaaaccaagcgcaaagcccactgcagtgcgattgcacaggtatctcaccttgcagccggcactactcccatttttcaggcaaggaaaccgtggctcagagaggttgaatggcatgctcaaagtcacaaagctggcatggggcggggctggaactcaagagtcagacagtctggctccaaggcctggagatcccaggctgggccccagatttaattcagcaaatattgactgactgctgtggacaaagtgctgggctcaccttggagggatccaacctccaggagctcgagcgcagcagggtagacaagccaggggcacgtgatgcggctgtggcagaagccaagtgcaggagctcccaggctcctttgttttactgagtcaccttaaatgtaactctgccctctcccttgcttcgccaaggctagcgagaaactcagtcttagccacacaggaggaatcggaccccttctgggggtttatgtggagtctgggaaaccaagggtggggtgaggcctggtactcaatccaggaggggcccctatgaccaccctcgcctgtttttcttctcaatgctccctgatcactggaccactggacactgatgtgtcctcagtgcttggggtctggctctgcaggcagcctgcagccagcctccatccccctttcagggacaaatggccttccaccagagtcggtgagtggagaggcacaatgccactccccttcctgaggtgggggtaggggaagggagtcccacaatgcagttacaaacaggatggacaagaacacctgctcaggagtcagacttacagggttcaaagttctgctccaaggtttgaccctaacaagaatcacttagtaataagtggttatgctctgtgaccttgagtaaattacttaccctctccatgtctctgtgcctgcgtttccttacttgtcaaacgggatcagaagtttcttccttgtgaggttactatgtggatgtccccaggcgtgtccattcagctcagagtccaccctcttcaaagactgaccatgaggcacgaacccatcatggctttcactcctggttttgccaggcaatacccagagtccagcacccatctattaatatcttctgctgcacccaaacctgggatgttccatccttcttggcccctgatccaccctttgtggccctgccacccaggctctcttcttctaaactggatccccccgaggactcccaaggggagctgttttgtttcccacaaaaaaagttggcagccttgcttcctgcctccctccttataagacccctcctgctaggaggttggtgccataagtcattctgtctcttccctgcctggggctgccactccacctcacttttgggatgcttcggtcttggctcatggtcttctcatccagctcttacctcaatttcaagtcgctccattatccaaggaccttatggccccttgacctctcaatgaccctcaccatggtcacacttggaggtttgtcatcaccccagattcctctacattcaaggcaggcttctggctctctgagcttaacctcattccttctagccagaacatgttctttggagcacccactggaccctccggctagccaacccttccaacaacccgccacaccccacattctcagagtcacccaggaccaccatctcttctatccttgatggcgtccaccactttctctcaaacgaatccttcccatcgaaatgtgtcttaattagctccatccatcttgacagtgtcttcccatctatcctctcatgtcaagcacccatcatctctctctgtctcccctccctttcctcttcctcctcagccgactcggcaacttctgctctcagcctgacttcactagaacgacgcccactaagcacaccaatggcctccatgttgctgaagccagtggacatttttctgtcccagccaggctggcccctcaggagtctgacatgtaggcactctgtccttcatctctggggtgctgtcctttgcaccctggctgcttcccttctgtgtctttctttctttctttctttcttctttttttgagacagagtttcgctcttgttgcccaggctggggtgcaatcatgaaatctcggctcaccgcaacctccgcctcccgggttcaagcgattctcctgcctcagcctcccgagtagcaaggattacaggcatgcgccaccatgcccggctaattttgtatttttagtagagatgggggtttctccatgttggtcaggttggtctaaaactcctgacctcaggtgatccaccctcctcggcctcccaaagtgctgggattacaggcgtgagccaccatgccctgcctccatctgtgtctttcacaggcttacttaagcctggacctgagccctcttctctgctcctctgcatggtctccctggatcagctccacacccacatggtctcaacagtcaagacccccaatcctctctcctgaagcctctcctctgtcctccaagcagtgtcatctctgcctccatgtgcacatctcaaacccacaggtcccacaatgaaccccatgagttgtccccccacccccaccccatgccctctcttgagggaacggccccaccttgcaagtcaccctggacaccgccttctttgtcgccgcccatcctgacgacgtttcctccttgaccgacttccagcccatccctttctctgcatctctgctcccccatctccccctgggtgctgctatagcctcctatctgcccctgctttcactcttgcccctttccagttcattctccactgggaagctggtgggatctttccaaaacgcagatctaactggtaaccctcctgactaaagcctttcaatagcttgcttctactgtcatcaaaaatccccttctctggccaggcacggtggctcacacctgtaatcccagcacttcggaggctgaggcagatggatcgcttgaggtcaggagtttgagaccagcctaggcaacatggcgaaaccccgtctctactaaaaatacaaaaattagctgggcatggtggcgcgctcctgtagtcccagctacttggaaggctgaggcacaagaatcgcttaaacctaggaggtggaggttgcagagagccaagatccactgcactccagcctgggcaacagagtgagactctggctaaaaaaaaatggggtcgggtatggtggctcatgcctgtaatcccagcactttgggaggccaaggcagatggatcacctgaggtcaggagttcgagaccagccttgaacccaggatgcggaggttgcagtgagccgagatcacaccactgcactccagcctgggtgacagagcgagactctgtctcaaaaaataaaaatccccttcttacagttcacgagtgtctccaagatcttgcctctgccctcatctactgcctgtcttccctctttctgcagttgctcagcccggactcactgacaagccacgggacctttgcacaaactgtacctctgcctccttccccagcactccccctgagcaccctccaagttcctttctctcgttctccatggcttcacaaatgtgatttcctcagggaagccttcatcctttgccccttccaccagatcaggtcacttgttacgttataccctcacggacttgtcacgtgggtgtttatcggtatggctgtcgaattagcatctgccgctctcaacagactgtgagccatgtgagggcaggagccttgtttctctctgcccaccattgtatactcagtgccttgcagagtggcaggcggcaggcacttaataaatattggctgaatgtagccaatgaggccatgtgtaacctatgagacataaaatgggctcatcagtattatttaaggaagacttcctggagtgggtaggatttgagtaggacctagagacgaggaggctgcaaaaagcaaaccttgttagctggtggacctggccaaggtacgccttcgccttggatctcatttctcatttgtaaaatgggcaggggttggacaaaatgagctgaagctctggcatcccatgtccctagcatctcccagccctagatcccacaactctccctattcccttgagaagggctgtcctccccaggcaggggcagagcccagttttatgcacagaatgggtcctcccaaggctcgggtgcctgatctgcaattctgcgctccgccgcagggcgacgctcggagaccagccacactgtcccaagtcccggcgaagacccgcccgcggctccgtaggtgcccggcccgcccctcgcagcctcctgacttcccttcctgtcctcagcggccgggcccacggccccgagcagccatgctgggcgcgcgggcctggttgggccgcgtccttctgctgccccgcgccggtgcaggcctcgccgcgagccgcaggtacgggcgggcgagcgggcccctagggcactccctgcgcctgcctgcgggcccagtggagggtcttccggacaccggtccccagtgccagtctggaccacccctgcatgcctggcccttcccccaccccacctccggtctgctcctgagacctggctctggctgtaaggccctcctcccctcctctcccgtcctcatcccttccctcctctccccttccttccagtgcagtgccagctcctcagggactgttctgacactgcttccaggaagccttccttgcaccccagtgctggatgctgggtcaagggcctttctccaatagtaccctgtgccctgtcacagtcctttattgctgcatggacctttcgttatttaggtctgcctgcagtcccacttccaggctgaactccctgaggtctctgattccctaggtgtcctggagtctggcccaggacctggccccacaggagtcccagcaggtgggcgctgagtgagggagtccccatgtctggtttcctctgtttgtccctcacctggtcgagtcccagaccctactgatcttggcctgtccagccaccaacagtaggctgccttccagtggggccacacccaggcctgccagagagatgcctccaagcagctgctccaggaagggccgggggaggggcctggggaggggtaagaatggagccccaagaaccattctgcccattgtgacccgccctgacctcacagccatccttcccaccgccaggcccaggaggttgggggagactaacctggcaaggagcccccaatgagccacctctcctcaccccccaaaaaacataagggggagcacaaaggccacagtctcccccatggttcagaa

SEQ ID NO: 229 - DNA, 6000 bp, Homo sapiens; identical to SEQ ID NO: 19

SEQ ID NO: 230 - DNA, 6000 bp, Homo sapiens
ttcttcttccctgtgactagccttcaggtgtaatttccagtacatagttccttataaattctatagctcaggagaataaataagaggctccttttccagaaaatccagtattggttttcctcctttggaggcgtagagtcagaactctcatggcatggcaggatccatggaggtggccacatctcccttttttcagtgagtattagatcccacaagacaaccgcacagctaaacataattaaaacttaggttttatgatatttgttcctttcctaaaaccttcagtgactccttattatccatagggaacatataagctaaataaatgtgaacttttttctccaagcaaaacattctccccagtgaatagaaaatcttgttttcctgtgttaccttgaaccaaaattttttttttttttttttttttgaggcaaagtcttgctctgtcgcccaggctggagtgcagtggtggcgcgatctcatctcactgcaacctccacctcccgggttcaagtgattctcctgcctcagcctcccgagtagctgggattacaggcgcctgccaccacaccttgctaatttttgtatttttagtagacatgaggttttgccaggttggccaggctggtctcaaactccggacctgaagggatccatctgcctaccttggcctctcaaagtgctgggattacaggcatgagccaccgcacttggactcctttaaaattattattattattgagacagagtttcgtgctgttgcccaggcaggagtgtggcactaccttgattatagacgcaagtcactgggccttgggattatagacgcgagtcactgggcccagctttctttccagttttaaagtattatttttaattatccaaactaaatgtgtagtaaatactcttcttataaatctttgttttcttgattgcttccttagcatataatttcagaaatagaactgatcaaagggtatgcacatttttaaggatttataatgccagatgccttccaaaagatgttaacaacttattgaactgacagtatataagggtgctatagagtaatttatttatttgaaaaacaaatctttattgtgtagaaatatgtattttaaaaatcccccagaaaagatgctcttctctcatttccccatcctcttccttttcttccacacctctgatatgaaggacattattataccttattaaaacttcatccacactaggcatggtggctcatgcctgtaatcctggcattttgggaggccaaggcaggcagatcacttgaggtcaggagtttgagaccagcctggccaacatggtgaaatcctgtctctactaaaaatacaacaattagccaggtgtggtggctgacgcttgtaatcccagctacttgggaggccaaggcacgagaatcacttgaacctggaggttgcagtgagctgagatcgcaccactgcactccagcctgggtgatagagcgagactctgtctaaaaataagataaaataaaataaaatgaaaacttcatccagatgtctagacaacactttaactatgtattcttctgtatttgcaagttacatgttcatatagccatctacagataccagttagcctttgtaatccattccccacttaagtttcaccatctactggcttttctgttaatcccttgaggaaaggtttggaattgaggagtaaatcctttataaggagaatgctgcagtctattcgctattcaccgctgaccaagctgccacctggccctcctgactgcagcaggcacccccagacagtcatgtaaatggactaggcctgagtctgtagttctttgctctgaaaaaggagacgtaatggcttctactttttatcatttggtggaaataatagaggagtttttctagaatgttttttgatctggtggttaaagggaacttggacatttagtccctgaaataaattgttgcatctttgaaggaaaagatgaaagtagtttcttacactttagtgaagaagcctttggaaaattttgttctggatgttgtatattctctgtagaggagtgttggggattccccacatcagcagaactaaagggtaactgaagagaacagggagtgacatgtcagattgagaatcagtcttttgaaagtggcaaaaagaatatgtgttaaaagaaaaaatagggtagaagataaaaagaatagggcagaagatattagcttcaattcctccttttttttttttttttttgatcctttggaatgatttcttcctagactgccagtgttgcgtagtaaccccgcccatgaagaggactggaatactgaaaaactgcatgaaactaagcgctgtgggttgggcggggtggctcacgcctgtaattccacactttgggaggccaagttggctggattgcttgagctcaggagcttgagaccagcctaggtaacatgatgaaaccccatctttacaaaagatacaaaaattagctgggtgtggtggcatgaagctgtagtcccagctactcaggaggctgaggtgggaggatcacttgagcctgggaggtagaggctgcagtgagccgtgattgtcccactgcacttccgcctgggcaacagagcgagatcctgtcccaaaaacaaaaaaactaagcactgtggattagaaattaataatttttcatctttatatctttttttttttttttgagacagtcttgctctgtctcccaggctggagtgcagtggcacgatctcggctcacttaggcaaggtgtttaattaatctctgaaaagtggagaatttagcaccaggcatggtgactggtgcctgtaatcctagctacttgagaggatgaggtggaagtgttaaaggtggagggtgtccaggttcttggtgtcttgaaaaaagaattggacaaaatgcacaaacaaagcaaggaagggacaaggaatttactgaacatgaaagtacactccagtgtgggagcgggcctgagcttagaagttcagtggctccgttacagaattttggggagtttaaataaccccagaggattccatggttacttcgggtatgccttatgtaaatagagaagatgaagtaaagttacaaagacatttatggcctatgccctatggacagaatattacctgttatagctgaagtgtgaattggccttatgttccctacctccagaccctattttcctgcctcaggaggattacttgagcctaggagttcaagtccagtctggacatcaatagtgagacccctgcctctgaaaaaaaatttttttgagacagagttttgctcttgttgcccaggctggagtgcaatgggatgatctcagctcactgtaacttccacctcctggattcaagcaattctcctgcctcagcttccctagtagctgggattacaggagccggccaccacgcccggataattttttgtatttttagtagagacagggttacaccatgttggccaggctggtcttgaactcctgacctcaggtgatctgcccacctcagcctcacaaagtcctgggattacaggcgtgagccaccgagcccagcaaatttttgttttttagacggagtctccctctatcgcccaggctggagcacagaaatgcgatctcggctcactgcaacctctgccgcttgggttcaagtgattctcctgactcagcctcccgagtagctgcgattacaggcgggcaccaccatgcccgactaattttttgtatttttagtagagacggggtttcaccatgctggccaagctggaaaattttatttttaataaatgaaaggcagagtatttatctgaaaaaagtgggagaccaacagtctcatgggattgttataaagattaaaagagagagtgttactgaaatacttagaagagctgttattctattgctgtcctttccccttgtatttggatagattaccgtacttgtttcttctatgtaactctaattgtcagtggggttctccctctcttagaggcctggagaaacttgtcttaaatgctttcccagttaatgaattgggagaggcagattttatgtctaaattacaagggcgagacttaaaagtatgaattggggctaatgtcagtgctcaggtgcagggatcctccgttttgttcatcacacagctcccggcactttaataaatgaggctcaaagaaacgacgggcttaggtcatgcagtagtcaaattcagaactcatgtttgattccaaagcccacacgttttcctagtttagaaacactaaacatttaattcaccgcaccgggggccagacaggtaatggagaacgccttaagtatgttaggaagggaagttatctacagtcgcagccgctattcagatctatttcactgccttgcagaaaacgccgactgtcgtctctttatcccatggccgatttcttgtgaaatctcctaacttttaaatatttccaatcaaaagactgccgttcaaatgcagcccaccaggagcatgtttgcaaactctggagtaaacaagagtgggaagctgataaggtgagtacctcagttcgatagtgacagccaagaaacggggagttttgtacctaaggcgagaaagaaattctccgccgaaatctcccggaagaaggactgaattaaatgcagattagagtcagggcagggtaaggtggcgggagaactaggctgccatcccaggtggctggcctaccagccagcgcggccggaggtacagaccatgtacagaccacggcgaggggtgttaggggcttctcgggataaaggcagcgagtggctgcgcattccctccccgactctttcagaggtaagccttctgtggagcagaccctaatcctccccctgattccttaggtcactcggcgatttacttccttcccccgcttcctcacagtcctccacagccctacgacttccgcttgcctcgtcgtctgggaaaccgccgacttccggccgcgcagcggtgggctgagctaaaatggctgaggagagagtcgcgacggtgagcgccgagattctctttagttgcccggccgcagggcaaggcaagctggcgggtggcttttgtcccatgcagcggttcctggagagaggcggagctgggtgccgagcgtctcagggtgggcggggcgacacggtcccctttttactgtcccgggaactggtcgcctggggcaagtctggatacttagcagcacaggtcctgttctaggactgtagtccctcttggggtgcgctggacggagaagggagacttttcaccagtaatggctcttaccgtagtgccatctttttctgtctcgggggtttggaaggtaatgactagcacttgtgtagacagttcctgttaatcccgtgaattgggaatttaacatgcctggaagcttgcagcgtcactgccttctgccagtggagcgggactgtgttttttctgtggtgattaagtttaggaaagtacggttttggaattcatctgaaggctgagttgggcgttcactccacagaactgctaatatagaggaacccgatgaattcaggatgacctagtcgctattttttgaggcatatatctataattggatctaatttcggtaaagtgccaagtgtgaagctttgtttaccttgctttagtgttgggtttgaaagcctgttctgtccatttgttagaatgattttaggtattcggaatttattgtctttcgaaaaacgccctggaaaacagtacaaatagcagcctttggctgttttacaacttagttttggctaagcagcaaggttagtgttattgttagagggccttttgtttgttttctactctcatttgcagagtagtcatattattctagtctaattagaaaactctgaagacagaaacttttttttttgagacggagtgtcgctgttgtcggcccgggctggagtgcaatggcgcgatctcggctcac

SEQ ID NO: 231 - DNA, 6000 bp, Homo sapiens
caggcaagagaaagaaataaaaagcatccaaataagaaaaggagtcagataatctctcttccctgaagataagaatcttttttttttttttttttttttgagacagaatctcactctgttacccaggctggagtgcagtggcacgatctcggctctctgcaacctccatctcaagtagctgggactacagactacatgctcagctaatttgtttttcagtatttttagtagagatggggcttcactgtgttggccaggctggtctcaaactcctggcctcaagtgatatacccgccttggccttccaaagtcctgggattacaggcatgagccactgcgcctcatcccctgaagacaagattctatacctagactccaccaaatggctcctagaattgataaacaatgtcggtatagtttcaggatacaaaatcaatgtataaaaatcagtagcattttcatataccaataacgttcaagctgagagacaagtcaagaacacagttccatttataatagccacacacacacacacacacacgcacacaatctaggaatacatccaatcaaggaagtgaaagatccctacaaggagaattacaaaacactgttgaaggaaatcatagatgacacaaacaaacagaaaaatattccacgctgatggattggaagaatcaatcttgtttaaatggccacactgtccaaagcaatctacagattcaatggtattcctaagaaactaccaacatcattttccacagaattagaaaaactattctacaattcatatggaaccaaaaaggagcctgtagaacagcaggaaaaaataaaataaaataaaataaaaccccaaaagagcctgaatagctaaagccaaagccagaggcatcatattacctaacttcaaactgtactataaggcaacagtaacccaaacagcacggtactggtacaaaaacagacactcagactgatggaacggagtagagaactcagaaataaagccgtacacctaccgccatctgatcttcaacaaagtcgataaaaataagcaatggggaaggactccctgttcaataagtggtgctggctagccttatgcagaataaaactggacccctacccatcaccatatacaaaaattcactcaagatgggttaaagatttaaatgtaagacctcaaaccctaggaatcatagaagaaaacctaggaaataccattctagacatcggccttgggaaagaatttatgactaagtcctgaaaagcaatttgcagcaaaacgaaaaactgacagacgggacctaatctaaacagcttctgcacaaccaaagaaactatgaacagagtgtggtgttacgatatatattggttttcatctgtggtttctggcttgtaactcccataaccctcgttatagtcttctgttatgttgagtgtgttaggcctcagaggcaggcctctaattttttcctgctctccttttacctgctaacaaccccccacctttctgactgtgggtcttaagaccttcccaggagagggtcccattggatacacatggacataaagatggtaacaacagacactgcggacgggagggaaggagggagcaagggttgaaaaaccaactgttgggtgctctttctactacctgagtgacaagaacaatcgtaccctaaacttgagcatcatgcaatatatccatgtaacctgcacatgtacccccgaatctaaaataaaacttgaaattactttaaaaaaagcactattttgcacagctcagtgatttttaggaattcatgtgtgccttcacagtgggagtgactgtgctcctcccagagtattttcttcatgtacttcttcaaatacctcctacacttcagaaacttctccagattttctttatacccttcaaccaaaacaacatgctgcaacagcatgaatgtagaagcagaaatgagaatccactgtcatctattaagccagacattaaaaagatttgtgaaaatgcacaacggtgtcaccattctttttgttttgttttgcaaaataccgttatttttcattaaaaaaattcacttcagcctttcagctgcctaattcagatccacaaaaatcccacagccaaagggaaccctgactgtagactcaccctctggattcctgtcctttcttccagaatcttgccagctagttcctcattatctcataaccctatgctatggaacataaattacctaaaccgtgccttttaggtagagggagaatctctggaccagctagaagcagaatttcaacattgtattggggtttgggtgcctaacataaaaaacatatttaaagttaataaatcaaaaaagccagcaaagtaaaacaaaaaataaaaattgtgtatgaaaatggctctgaaaggatctggaaggaaagcacaaagtgagagggtataaaaagttacagctttggaaaatagcttgatatataatttcagattttgtatttctacagtaaaatgctacttgagcatttaggcgttttagttttccacacatgaacctcatcgatttccagagtttgtggttcttggtgaggatagcggggaggattatcttactcctacaaggttttggaggtttgacaagttgttgaaaatattaaaaggcacataactattactagctcagcaacattttgtttcagtataatcactgattcactacctattttactattgatattaattccaaaagctagtgtgggtcacatagattccattttacatgaagaatataaagtttccttactagaaatttacttctattattttatacacctttagaaaaatctaatgtcacattgattcattgatacagttgtgtagcggctaggtgtttttcctcatgactatttccttccttcctttaattattatttttttttaagatgggggtctcactatgttgtccaggctgatcttgaactcttgggctcaagcaatcctcccaccttggagaaaattaaagaactctttcctttaattctttttctttttctttttttagatggagtctcgctctgtcgcccagtctagagtgcagtgtcgccatctcggctcactgcaacctccacctcccgggttcaaacgattctcctgtctcagcctctcgagtagctgggattacaggcggctgccaccacgtccagctaatttttgtatttttagtagagacgggggtttcaccatgttggccaggctggtcttgaactcctgacctcaagtgatctgcccgcctcggcctcccaaagtgttgggattacaggcgtgagccactgcgcccagactttcctttaattctttactattcagctattttatccttccttcttacccagtttgaaatgtaattcatggctgggctgggtggttcacgcctgtaatcccagcactttgggaggccgacgcgggcatatcacctgaggtcaggagttagagaccagcctggccaacatggtgaaccccacacccctccccctcccgtctctactaaaaatacaaaattagcctggtgtggtggcgcatgcctgtaatcccagctattcgaaaggctgaggcaggggaatcgcttgaacccgggaggcagaggtcgcagggagtcgaaatcgcgccattgcactccagcccgggcaagaagagcgaaactccgtctcaaaaaaaaaaaaaagtaatttacattttcttctgcctttttcacaggactcactagtctcagttcctggagatgggaagtacaaaacctgtttctttactcagttgtaacttgcactggctttcctaacaattacagcattctggggttctctgggaacttacacatctgttctttgctccccaaataagcaggtactttttttgattgctcttaaacaatctgggtatttccctcccggcctcgcgtgatgcagtttaaaaaatagaataggtcacgttattcccctgtttcatcttgttgataatttgtggagtcgggtagagactccatcttctatcttaagtatctggcgcttgtgggggaattaagatcctaaatgagaatactaagtccttcggcagttggcactaatcaattactcattactgataacggaatgagccactggaaattttaaaaggaaaagtacatgggagaacctgatcaatttagccagccacttctggagtgccacagtcactaatgaagcaacctccagtgcaggccctggctccagggcgctatgtacaacctcctgcctcgcgcaacgtgggtctcccggagcctatcctgccagcgccgcgcacggtcccagtccaccaggccgccaaggcccggaggggggcgccctagtcgcggggaacactggaaatgcttcaggggcggactccgaagaccgagtattgcctcgagggactttctgcgccaccccgtaatcgcttgcgctccaggtcttcgtaggtgggggccgggtgggtgaagactgggaccctatgccacgcgcagcactcagaggagggctggggtcccagggccgcagcgcggtcagttcagtccgggctcgagcttcctagcagcgccctccttgggggctggccctgaccctcggtgccgctacgagtgggtggccagaagctggtggtggagagggagagcgtctgcaaggaacgacgaggctggcgccgggaccacgcggcggaggcgatcgaaagagaaacgaggccaggcaaggaggaggaaatccacccgatgaaggcgagctgccgcctaagagggaggagggtcctttcggctgccgctgctgctgttccgggacgccgcctggggagccagcccgctcgtaaggtgcgcgccaggtagctccgcacccagggggcgcccttcctggcccctcccagagcggccgggacggaaggagctgcgcggcgcggcgcggcgcggcgcggcgggtggcgagggcgggctgcaccccgagcgcggcgcccttgagctgcaccgcggcgcaggtttgcgagccgacttgtcagccggccaagaaaaggaagctccgtcccttcccgctcacccggcttccccaccccttgtactctaaactctgcagagggcgagcggcgcggccacggaggcgccgaggaggagcgagccgccgccgggcagcggcgtgccctcgggggagagggcgccggagaggaggcggcggcgcggcggcgagggcgcggcgcgcgatggcagctgcttagcccggcgggcgcggagcagccccgagctgtggctggccaggcggtgcggctgggcgggggacgccgccgccgttgctgcccggcccggagagatgagcacggaggcggacgagggcatcactttctctgtgccacccttcgccccctcgggcttctgcaccatccccgagggcggcatctgcaggaggggaggagcggcggcggtgggcgagggcgaggagcaccagctgccaccgccgccgccgggcagcttctggaacgtggagagcgccgctgcccctggcatcggttgtccggcggccacctcctcgagcagtgccacccgaggccggggcagctctgttggcgggggcagccgacggaccacggtggcatatgtgatcaacgaagcgagccaagggcaactggtggtggccgagagcgaggccctgcagagcttgcgggaggcgtgcgagacagtgggcgccaccctggaaaccctgcattttgggaaactcgactttggagaaaccaccgtgctggaccgcttttacaatgcaggtgcgtgtgtgacccctttcccatcccgcgcggtcgggacccgcgtttaatctggcggtcttcggggcatttcatttttctgggcgggaagcatttacttcttgccccactttgggggcagcgagcgccgctgcgtgactgctcctgtcgctcgccgctccggagagagcgtgtgtgcttgtgcaagagtc

SEQ ID NO: 232 - DNA, 6000 bp, Homo sapiens
caaagaaaaaagtttgaaagtcacaaagtctagttatactgttctcattcttgttgacatctattgaggtacttagccccgactatagttattccctctgtcccaattcctgctactatcttagggaaattcagagtccttaaacagaaccaatccaacactctggctttttcattccttaatttcccatttccagtgatctttacctcctcttcacttttgtaattcactctaagatattttgatcctgttttcattcagaattagtcattggtcctctctaacacttttgtgctttttcctctgctttgcttttaaattaaaatgccttcattgtttttccaatttaaaaaagcaatgcatgtttggtggaaaaacttttcagaaaatacagaaagatgtaaaaaagaaaattaaaacattgcaactcgtggatttgcactcagcatgttggtaaccttagaaacacattgctgggaatagtttttttttgtttgctttatctaaatgagatcttactatttattttacttttattatctgcttcttgcctgaacaatttgtctttccaagtgaataaatgcagatctacattgacattattatggctgaaaaacaattaattgtacagctataatattctttaacccagggtgtcttaacttcagcactattgacattttgggctgaataattctttgttgtgggaggctgtgttgtgcactgaaggatatttaatgcctccctgccctctgtatcagcactagatgccagtagctcccatccctagttatgacaatcaaaaatgtctcaagatattgccaaatgtctgctgtgggcactactgcctcaagttgagaaccactgatctaaccaatctgctgttgtttgacatttaggttttatctactttgtcacaatttaaagcagcagcacttatgaagctcctaacatatacaaactcaacacatcttcaaattacttctatagcataaatttctagcaaggaatggcacatacaaaattttgatgtctattcccagatttccctccagaaagattgtattaatttagaacaccattgaaacagcataaatgtcatttcctgagatcctgtctacttccaggtattgtcaatctttttaatcttgctttgtgataagcaaaacaaagtattactttacccttttaacttgtaattctttgattgcttaccaggttggtaacctttactatatttattagctatttgtgttactgcttttatgaactgcttattcatctcctttgctcattctttattttgtaagagcattaattccttcttccagcttgtaatttttctcataacctgatttaaacctttcttcttataacctttataaggttttctgtacagaagtcatacatttgtatgttttcaaattattagcctttttattatggttttacctttaatggtgccatacttagaaagatcacctctaggtccaggcctggtggctcacacctgtaatcccagcactctgggaggctgaggcaggcagataatttgaggccaggagttcgagaccatcctggccaacgtggtgaaaccccgtctctactaaaaatacaaaaattagccaggcgtggtggtgggcacctgtaatcccagctactcaggaggctgaggaaggagaattgcttgaacccgggaggtggaggttgcagtgagctaaaattgtgccactgcactccagcctgggcaacagagcaagactctatctcaaaaaaaaagaagaaagaaagaagatcacctctaaaatctctaaacttcagtattttactctattaggctaaccttttattttgctgttatctttcatactcttaacactaaatttttttttctctcttgaccagtgcaccttaaacttgaatgtacatatacatcatctggaaatcttattaaaatgtgtgttctgattcagtaggtttggagtggagtgacagattctacatttccaacaagctcccaggtgatgccagtgctgtccctggcctgcactctgagttactagctcctaaaccttcagcactcagtcctctgtaccccctacctccattctctgactccttcctgaagttgcctcccttcctacctagtgtgaaccccaatggcagcaatttcaactatagctcatctctgtttttccagaacaacaatcctggcaatctccattccagtattgatgaagccaccatttcttccagtctccagccacagcaccctgcaggaaatcagatagtgtccacgtacttctcttaaaaagataggatttctaaggtacatcagcaagccttcactttgttcccacccagttccctttcccattcctagagtaactttgcctaaatttaatcttctcaagctccagtccccctcctcagacctcttagtcaatgaacaacaatgaaagggaaacgtcttcaacccttccagtggaaataacatttagcatagtgactactgcacaattaaaaaaaaaaaaacctactcaaagactctacaatgtcatactaagacttccaactcttaggccaggcaaggtggctcactcatgtaatcccagcactttgggaggctgaggcagaaggatcacttgaggccaggagttcaagactagcctggccaacatggtgaaacctggtctctattaaaaatgcagaagttaggcatgtgtggtgtaaaaatacaaaagttacgtaggtgtggcgatgcgtgcctgtaatcccaggtacgttagaggctgaaacacaagaatcgcttgaacctggaaggcagaggctgcagtgagctgagattgcaccactgcactcaagcctgggcaacagagtgagactgtatctcaaaacaaacaaacaaacaaacaaacaaacaaacaataaaacaacttctctttaagaaaaaaaaaaagatggccaggcacggtggctcacgcctgtaatcccagcgatctgggaggccgaggcaggcagatcgcccgaggtcgggagttccagaccagcctggccaacatggtgaaaccccgtctctactaaaaatacaaaaattagccgggcctggtggcaggtgcctgtaatccgagctactcggtaggctgaggcaggagaattgcttgaacctgagaggaggttgcagtgagccgagatcatgccattgcactccagactgggcaacagaattgagactccatctcaaaaaataaagaaagaaataaaaaattaaaaaaaaaattccaactcttggaaaattccctttaaagagttacgaattaagctggtttatttatgtaataaacgcttcgcacagttcttacaatgtgcctgccaaccttatttaggtaggtacaattaagacttccactttacacaccagaaaataaggcacagagtcgacacagccactgagtgtcagagcaagaattggcactcatcccgtgagcgcctcagttctttttttttctttatatatactttaagttctagggcacatgtgcacaactgtggcacatatacaccacggaatactatgcagccataaaaaaggatgagttcatgtcctttgtacggacatggatgaagctggaaaccatcattctcagcaaactatcgcaagggcagagcgcctcagttcttaaaccactcttctatgctgcggcagaatcactggaagtctcagggagtcctgagtgcgcaattctaggaaaagtatctatatctgtaagaaagaaggggcagggaatctaacggttctcagctcttgaaggcacattagattcattcaaggtcctctctaaaaatacactttcttgggcctccacgagaaaaattctattcaattagtcgtgggcttgcatccgtatttttagtctgtaaaagtggaatgttatctcaaatcagtggttttcaaactttttatattctgcggaccttgacacgggcccccaataccctgacacggttacttacaatccgggagagagtgggagaaagggggagagagggaaggggagagggggaggggagagagagagaatgaatgagaatgaatcttttagagaggtagagggggttggcccgtgccacaaaccacctctcaggtttgagtgaagccttcgttctctctcgtgcagagaccatgccatccttccagaaaggagcattttaggacgttttaggacgagagacctgtaattggcctaagactcaggtgcaggtggaggaagcatcggatttacaacagtggtcctgccttcttcgatgtgacttccagttttaaattcaattctaatttacacaaatcccacccactatgtaaacttgttggaaaatgtcctgcactctgcacttcgtggcatttaaaacttccacacacgcgcgcgttctttctcgaagccccgtgattgcttagcctcgctgggcagcttggcactgctgggagcttggctcgccctgccggggccgacgccgcccgtcccgcaggagcccgcgcggggctcagggcactcaggactccgcatgcgtcccggctccaggtgggccccggcaccgccaaccgcaggaaacccgccgagccctaaacgtctcccaagcggctgcagtctgcgacagagagtgtccctcggtggagcgccctgtggctgcccaggctacagccgtggccgaggcgaggacacacttctgacctggggctccagcaaagactgtccgcgagcggcgactccatgcccgcagccctccgcccagctcagccgcccggccgcgggcaccagcagccgcgccacgaaagggcgcaccgcgcgggcgccgtctctcctaggtgcgaaggcggctgaggccccgcccgggaggcacccgcgcggctccggagtgggccggagggacgtccgggggcggggcccgggcgcgcccgccctctgaccgggctataacacccggccccgccgggcggccgcgggtgggtagaggtgcgcgcctgggacctggtgaggctgggggtgcgcggggccgggcgcagctgtggcagctgccggacggcggaggcgccaggaggaggaggagagggaggcgcgggcggctgggtcgagggcaccgaggctgcccgtgctcccggtctctggttgcacggctcactcccgaaggtgttgcttccagcttttgcctccttaggaggcagggagcgtcagtgtcgggagaccctgagaccggagtaccgagacgtagctggtgatgcccccgcctgccctcatgtgttctcaggttcttcttatttttattcatctctagaacatggacttcccgtgcctctggctagggctgttgctgcctttggtagctgcgctggatttcaactaccaccgccaggaagggatggaagcgtttttgaagactgttgcccaaaactacagttctgtcactcacttacacagtattgggaaatctgtgaaaggtagggtccgtctcgtgaacactttgccaaaccctcagtcctccctttcagtattcattaaatatgccccagcttcctgtctgctcttccacgcacctactctgagtggcacagaacaagtcaaccggtaccgtgcgtgttggttgttttctgcttttgttgggaggaatagtaggaagaactgaattttactggacttgtccattgtaattcagtgtcactgagtcctttccattattggagttcttctgtctttttggatcttgcagacattggttatttgggatgtatgttttagttccttttcaagataaactcccaagtaagtccgtttatccgtttcagttcccctttgtgtgggcttctttatatatgacttggactgttaatgtcatttcttcatgtctcttttaaactgaaataatgcagttttgttggtaagatttctgtgtcatctgtagttagccttttatttaaagttatgcaaaactatcatttctgcaagt

SEQ ID NO: 233 - DNA, 6000 bp, Homo sapiens
aaagactgcttggtatccagcacaaccactgaaaaaagacctatttgtaaggtgcatcaatatgacatttcagactactagggaaaatggaagattctagaaagaaaaataggtcagatacagaggagtgggaactagaaaggcattagacatttcaatggcaacactggaaaaatgctttcaaaatgctgagggaaaataattttcaatccatctaaattatcagtcaggaataagagtagaatgaagacattttcagacaggcaagtactctaaaaatttaccctctagtacctcttctgagtaagctactggagtctgtgatctggcaaaataaaagagtaaactgaaagttgtgtgtttgggcattggaagatattattgatgggcatttgatagatatgttgaagcatttgtatctaaaatttaggttagatacatttttattttatttatttatttattcttgtagagacatagtcttactaagttgcccaggctggtcttaaactcctgacctcaagcaatcctcctgccttggcctcccaaagtgttggaattacagttgtgagccactgcatccaaccttagctacatttctttttcttttctttctttttttttttttttttgagacagagtcttgctctgtcgcccaggctggagtgcagtggcgcgatctcggctcactgcaacctctgcctcctgggttcaagcgattctcctgtctcagcctcctgagtagctgggattacaggcgtgcgccactaagcccagctacttttcgtatttttagtagatacggggtttcgccatgttggccaggctggtggtctcaacctcctaacctcgggtgatctgcctgtctaggcctcccaaagtgctgggattacaggcatgaaccaccacacctggcccctaattgttgatttgagtgaacattgtaatatggttatgttgcaaggaagcatgagggcaaagttgttgtggtggtgggtaaaagagctaaatcctcaaataccataagatgtcaataaagaatatgtaaaactgaaaatcaagaaattctgttacaaggttatcatttaggagatgaagaacatggtagggttgtgtggaatgtagggtgaagacaggtggggagaagcagggccgggggctgatggcactcattgatgttttttgttataagcctttaagaattatttgatttttcacttatgtgtgttactttcactaaaaataaaaatgcaaacaaaacaatacacatacattgtagaaaatatatcacatataataaaatgcgcaaaaagaacataaaaagatggccagaatctcatccatccagaaaactgagtgtgcctgtagtctcagctatttaagaggctaaatggggaggattgtttctgtattttatgggctgcctccatagatgcctgggagttagaggctgtcatgtgatatggtatctgtgactggccactgtactcctgtaccccagcatgggcagcatagcagaccctatctcttaaaaaaaaaagtctcacccacccagaaataaccactggtaatatcttgaaatagtttcatctgaaaacaaatgaaagtacttttaaaaaaaccttttggtttgtttgtttgtttgtttagagacagggtctcactctgttacccaggctggagtgcagtggtgcaatatcagctcactgcagcctccaactcctggtctcaagcaatcctcctgcctcagtctcccaaagcacttgggattacagacataagccagtgtgcctggtgaaagtatttttaaacacttataaaactacaaacactcttaatacactaaaactaccaacacaggaaaaagtagtgcttggggttattcattttttagtaattcagcctttctgatcaaaatgtttggcgtcatttagtttgtatcttcactaacagagcagagtggagaattaaggcaacttctcaaaatatttttgctttaattataatttttagaaaaaaaacagcttttggtcttagtttttcaaacaattggttctattcagaagattaagaattttggaaaataaattcatcaggaaaacttacttcatttaaaacagtttttggctggacatggtagcctgtaatcccagcactttgggaagtcgaggtgggtggatcacttgaggtcagcagttcgggaccggcctagccaacatggtgaaaccccgtctctattagaaatacaaaaattagccaagcatggtggtgcatgcctgtgatcccaggtattcgggaggctgaagcacgagatctgaaactggaaggcggaggttgcagtgatccgagatggcaccactgcactccagcctgggcaacagagcaagactctgtctcaaagaaaaaaaaaaaagagtttttgtatttgttgcccatttcaagtgtggataaatactttcatttctctgatctgtttgcttgaactgtttcagtgaataacaatataaaaagtgcaattcggtctttatacatcccatttaaaatgcagaaaaacttcatatggtaaatacagaattctgagaaagtatccttggaaagggaatattggtgaaacaattaataatacagatttaatgaactggatatatatatatacacattatatatatatatatataatatatatgtttgtttttgagacagagtttcgctcttattgcccaggctggagtgctatggtgtgagctcggctcacacaacctctgcctcccaggttcaagcgattttcctacctcagcctctcgagtagctgagattataggcaagcaccaccatgcctggctaattttttatatttttagtagagacagggtttctccatgttggtcaggctggtctcgaactctcaacctcaggtgatctgcccgcctcagcctcccaaagtgctgggattacaggcgtgagccactgcacccagccatgaactggatatttttaaagagattaagctaccctgaatttttcaggaaaaaatacagttgatgtattcttctacctcctaaggtcactgagttttaattagcttaaaacttgcaacattcaactactatttactgaattcctctcatagctcaggccttgtccttgatatattaacttatatgttctgtacaatctcaaaaacaatcttgcagttttcatgaggcatttgtagaggcctaatatgaaggaatatagtgggacatagagtatagtggatttctgtgggtttacctggctttggttactgctgttggtgttagagaattatgcatatcaaagataatgatggtgcatttatcaggaaagaacagagctactatcagccaccagagactagcatgggagagtttctgtaggaggtagtgttgatacagactcttgagaggacactgtgaaattggtattttctgggctgacttcacagatgttcacatataaccatcctgcccacagagagttatgaaatagctatgtgagtgcacaaggtagctattgcgcaaaccaaagttgtcaggtactgcacatattgtgaagggactatgatgggacaccgtgtggttcaaagagcactggagccctggtacatcctgagagtcttggggagaaaaaggggaacacgcatttgggggcctgaaagatctttctctctgcttgactgcagggcaggtttctgtccctccctgttctgtggtatagattttgtcttttccacatcagtccaggtcttcagagtcactatgaattattattaccattttaaagatgaagaaattgagcctcagtgaggttcagttagctaaaggcacacaactctaataaactgacagaattccaggttctgatttaaattctattgccctctcttgaaaataaacatggacagcttatatgagcttttgtgtatatattttctggtctaaatctgcggcagatatgtgtgtctttctgcgcatgtatatagtagatcaaatatgttagctctattgacatttcttagaaataaatatcctgttatcaatgatagtgtttacaaattatttatttagaacttacctcttttcaagaaaaggccttgtgattgctctctgcgaattataatgcatgagtatacctctttgttattttgttttgtttcagacaattatctctggttgatgcagatcacttggaggcttttggggctgtatataacaggtcagaacatctatttaatgtcaaactttatctactaggcaacttggaattctcagccagcaccaaatattcaaatccaacttccacaccccgacaacagaggggttccgggtgtaggtgtagtgctggtgcacccatgagggtgtttttcaggaattctggaggtggtgctggagagaacacgcttcttctacacgcgccccctaccagtttggtatgcacctgcagccccaaagaagaactggcgggactcgagtgtggccgtgtcagacgtggcaagaaaaaccagcagttgccttttcatctcttttctgatgatctaaccatgaagtccccagtatttgagcatttaaggcagaatgtaaattcataatttaagaagattttttgttacgtggctagcccaggtactgaccgctgcgggggcgggctcacacagttcccccgctggcaagttttgtgacttgctttggaaaacccgggaattgcaccctctgcccttggcaaggtgtgagcttccaggatctctccgctgcgacttcgggtgttagggtttttgggctctttccgggacccaagttccagggcaagaaggtctgctcggcggcccgcctcggggccccgcccactttggccagggtcggagccgcccggagcgggagccggagcccgagcggccgcggcccctttaaggagcagctctgcggtaacccgagcccgcagtccgggcgggcgcgacggccgccgcggtagctggagcctccgcgactgcacctccaagcggcccggaacccgcggcttccctggctcccgtgagcatctcaccgggcggcactggccagcgccagccctcgggccggcccggatgagcagactcctgtagacacccgccgccctctcccggctcggcgcagccgccgcccgcgcgcgactcgccccgggacccggcacaggtgacgccgtttggagggggggttggggaggaaggcgggcttgcctcgccccgcggctcccccgcgccagccgccaagcgcagcccgcggagaggggtgccgcggcttcccgcccctggcctagcgcggccgagagctcctgcgcctggaggctgggtgggcgtccggcgcgcgggaggcggcccggggctcccgggcgggctccggcaggtgtgtgcggaaggctcagcatcgtccccgcccggcgggccacggcgtcgctccgggagcaaatggtgtcccggggcccgcggcccccgcgccgcccgggcgccccgcattcctctcgcgtttctcgggctgcacgattccggctgccctgtctgcctggcggtgcctctcgggtctgagcttaaagcgggtgggtgcaaacctttgggcatccagggagagctttcttgttagagcccacacacaatcgggcgcatcaagtgggtaagtccccctcccccgccgccaccttctgaaacaagtagctcttatttacccttgcagttctcaagtgggtcccatttttagccactgagtgctgaaaagtctagtgggaagggaccaggcgtagagtcggagggagaaattggtttctatttccatctttacctctgtaacccctaagtgcctcggtttacccagccatgaaatgggattcgtaatgccagcagtttcctacccctccaagacggcagaaaaacctctgtgaaaacactttgagtctaaattcatttaagagtcgctgttgctggtctgtatatttttaattgtacacacattt

SEQ ID NO: 234 - DNA, 6000 bp, Homo sapiens
cactcacctagagaatcatctcaaagtcaaagctatgtccagaagcaggtcaggtttcagtatccttgaagtgctggtgctgaggactctagctctttactgctccctgtagatgcccttaaggagtgtgtgcagagacatgaccatctcctgtatgagggtgatcattcctgaggatctatagattccttgatccccacgagttccagtggatctacagataaacagttgggtgaagaagaatcaattgagaattgaggtcagagaacttaggttctggttctagctctgccatttaataagctgcgacttgcatgaagaccaacatcctctactgtaaggagtgaaatagcaaccatcactgtggatgtaactctgtcaaatagcttggaatttagtaggcttgaaacaaattttggttaaatcttaatttccattatattagggttccatgtctacgtttccaatacaaagatattgtgagaaatatcagataatttaaatgaaagaaatatcaaataattaaaatgaacacattgcaacaatggaaaatagtaacatgaaggcagttaaattcaaggaattaagtttcatgaatttgatcaatgcaattactgttacctacctctgtttaaaaagacagagaacaataatttttactcttctttatctctttttcgtaaattctcttttcttcctcccttttcccatataacccaacttcacaacctttttatttcaaaaaaatgcaaagtttattagacatttaataacctacacattattctgatgctttttatttctttgctgcataggtgattgtctacattgtttccaaattattgtacgaactggattttttttttttttttgcaagataataggagactcggatattggctatagtggattccacttctgcttaatccaggtcaggatttatggagacctcatgtggtgacaagaggcaccacagaaggctttcttcaggctgggtttaacagtgaaagagaaactcagaaattcatatgggagcaaaataatccataaagaattaagacctagaagttaatgtttctgaagcctgcaaggccttcaacaaacatcctgcagtaatactaatggaataatacagtaatatgttaaaggacaggagacctggttgtttatgtatgtataaaattccccttatcaactaaaaagttaataacgcaaaaaatagtaagatatgcctctcaagaattaattacagtctttcttttttctgaatgaaatccactgaacatagcttcttatttaaattggcttcaaattttaaaaagatgtttctgtaggcatgttgctatgtatgttagtttctccttggttttacacaaaacagaaagtgatcagagatagaatgaaacttgaacttatgtctgtgaatttcacttatgcaacaatatcaataatattatttataaatatttggaatgcaggatatgttcttggaattaaaatatggaacaacaattctatgtggtgcacaaagttgaacacaaacacctcttgttgctgacaagatattaaagttgtgaaattaaataaattaatgtatcagcaaccatatttaaccacataatttactggtacacactaaggaaaattcactgagggttgggggagctccttcctcaatgacaggtacttgttctttatctcattttccttacaagaaaatgtgacaagggcttcttttttctcctcctcaaggaagttacataacagacctttaagctaaaatctagaaggacaaatgagttaataaatgtcaaatgtttttgaaggttttaaaagaatagagcaatataaatctgtggcattaaaatgagtaatcctaagagttccaattcagttatcagatggtaccctgcctttgggcgtgtcctcgaaaaggcttacgttttccaaggcaggcaaaatgaggtaagtaggggtagccattatgaaaggacatcttagaaaatgttaaccaggaaaaacgttaatgaggatattgcagagattttaggttgagcatactcttgagttaaagaaatcggttacttatgaggaaacctattatgtggcaggcatagatgctggaaatacaaagagttggacaggtcttgctttcaaggaagcttctaataattatacaaataactactacaatatgaggctggtattaggcgggggcttgcacaaattccagggaaagcttcttaacgtggaaatgggaggaagaacaacaatatgatgcatattaaatccaagagaaggagcagagtcatttagatgtcatttcaaacttacagtgacattggctcttgctgggggggaaaggggggcgagagaggcagccgttgccagacatacgtcacactaaagagacaagatgaaacaaggaaattctctttcaaaacatagcggggaaaaaaatatccagaactgccctgaaataaagaaaaccttctggtataatgtgcgttgctagggatttattttttcccctcctttctctcataagagagtaaaaaatcacacagatacgttcaagcccttaagagttttgtgagcctattgaatatccaagacatcaactgaccacggtgtggttcagtgtgtgtctacaaaggaagggttaaacggaagggggtggcttggagatagaaaggcaagcaagaaggttggaaaatgctgttttccaacttgcaaaaactgaacttttcagctccccaaaatacacgtgtgtgtctgtaagcgcaggcagatctatttcggtaggatttttcttaaatttaaatcataatttctctgtttctgtctctctgtctcttgctgcgctgcaaagagtgagcagcccccttaaggatcgcgtggcaaaagctgcaggagaggcactggcagggctgtttatttatgagccgcgttcaaagccgacctcttcccattctcccactgcaaacgactatctccgagcccaggtcacctctggggccaaggagttgggggctggggctcgggtggctccttcttcgggccaagtttgcccgcgcgtgggagcgagggggcgagccagggcgcacgggaacgcgcgccgccagccgccgcctccgcccagcgctggcagccccggcctcacctctcccctctccccagcgaggtgcgggctcccagagcggagccagggggcgggcctgggcctcgaggggcggggtcagggggcggaggctcgggcggctatataaggcccgcgccggctcaacttcggacttggtgttatttatttgggaagcgcccggacggcggagcttggcggcggcggtggtggtggctgccgcagactgtggttaaaaaaaagaaggcggcggcggcggcggcggcggaggcggaggcagctgcgaggcatgggagcgccgaagcgcccaggcgcaggccgaagctgccgcgctttctgggcacggcgggagtgctgagcagaaaggggagcgccgggggcccgcagccggctccggaggcgcgggccgggtttttgtttggctacgctgagcgccagtcagccccagcgaacaactccagttacgacaacaacccaccttccttccagacaagcgagacttgggctgctgcgtccgtcctattgtttagacacttgccaggggctccggagtcggcagagccaccgagtccccgctctgagtcgtcgccctccctctccccgacctcgctccctggagcgggaggccaggaaagcagcgggagaggggaaggggctagaaggagaaggactacccgggactgcggccgccgcgtcaggtgcagcgccaggagccgggcggcgtcgccacgccggcaggggtaccgccactgtggccttgggggacggaattcaaagcctgggaaaagttgctgcactttgagaaggacgaaccactagtgggagaccgccgggggccggccgtggctctgcgccctccggaacccggctcttgtttcttctacctttgccatcaggtgtctgccgcggagctgcggcttatctgggagacgagcggggttgacacgcgcgcacacactactgccattcagctgccgcctggctctgcctggagtagtggatcccacccgcccacctgccaccgagccattctccagtacgccccagcaggacgctgacacctccaaccttggcctttgcctttccactccttccggtctgcctggtttttaagtccgcccccagtcagtccccactcagtcttcgcagcagctctcatcctccacttggcctcttggagttcctcgccggagtgctgactagtggatatttctgcccggctgcggcggcccgactgcccttttgtcttttctgcgtgacctcggggcaggtcctggtgcagagcgtcgccaaggacgccgagcgggaggcgggattgcccagacatccttcagcgaagtgcatgtgtgtttgtaaaccatcgttggctgtcgggagaccgcgaggaccggtccaggctgcggcggagtcgagggcgagggagaggccgcgtgagtgagcagagtccagagccgtgcgcccccagaactgcgcgtccgccccgtgcacccccgcgcgccatgcccagttgccccgcgcgctctgctacgggcccgctgggcttccgcgccttctagcttccggagcccactttgatcggggccataatacctattgagatcccctcttctgtcttgtaccttcgccactggcatcggatttgcagaagcgtgcgtgggatcagaggaccgccctccccacaacaaccggcccctgcatcttagcagccgttggaagccccagctcttttaccgccaagttcatccttgggagacagaagacgcgtgatctcctctccgctgctcttggggtctccttgcagccctggccaggcggattcatcctcaggacctaaagttgcccaaggagctcctgctctgccagaggagggtggagagggcggtgggaggcgtgtgcctgagtgggctctactgccttgttccatattatttggtgcacattttccctggcactctgggttgctagccccgccgggcactgggcctcagacactgcgcggttccctcggagcagcaagctaaagaaagcccccagtgccggcgaggaaggaggcggcggggaaagatgcgcggcgttggctggcagatgctgtccctgtcgctggggttagtgctggcgatcctgaacaaggtggcaccgcaggcgtgcccggcgcagtgctcttgctcgggcagcacagtggactgtcacgggctggcgctgcgcagcgtgcccaggaatatcccccgcaacaccgagagactgtgagtatgcgctcttcgtcttcccctctccccatccgggccgcgcacccctgcctccactggaggaacctgtcagctcagggtcctgtgcctggggcagccctcgctagctctcccccatgcacatcctggggttgagctctccgggagggcactggccagggaagggcctctgtccaaggaggggcgggtccgctggcagctgcgctagttctccctcccctgctctcgtcccgccactcgcagctccttgctggctagttctctggggctggggagcgggtagataggggacaagtactggaggatgcccggggcaagtgagacgccactttgttctccagagtccataaacggagtcaccttgcgattgccagcatccaggtcggtttcagagcccagtcctcgctcttgtcgcaggctggcgcggaggggatagcagggagactcaaaagagagaaacttgccttccccgattttttgtcaccctcctgggggcgaaggttaggaagaaggggtcatggagtgcctgggggtgcttctcacaggtcgcggggagaagggtgccccaggacggcgacacctcgcatagtagcctcgcgcagccccccgcccccc

SEQ ID NO: 235 - DNA, 6000 bp, Homo sapiens
cttgtcgcctaagatctcaggctggcttcacatggccaaacgcgtccccattctcccctagtatgtgaagagatgaaaccaagtcatctattgaacaaatgtccctgatccctggggctctgattggaccagcctctgagtgatgggttcatagactgagaataagattaaccctcaaagctcatccctagaactaggggtgcagtctaataatggagggaaaaggtgcttcctctggaaacgaaaatctaaaaagtctgttagaaaaagaagggaaaaatcgactgaatttatttttaccacttccatatccaatttacatttttttcagtgacagggttatcaatttttctcttctttcctctgtcaatgaaaaaaatgtaaactggatatggaagtggtaaaataaattcattgacagggtcaagggcatagaaatggcagcataaaccttagtggtgatgtatttgactgctttctataaggtgataggagaagaattactcaaagtgagttatgcataccaccttaaacaagcatctttggatacttgtctgcacattttggcattgttaaataaatgcaggtactagcctatacaggcagtacctttccaaaagttattggagctttcctggtggctgaatctgcattttccagggagaatgtaaagggacgaatcctgatctttataatccaaattcaaaatcctccttgtctgccctgatccagtgtcagtatctcagacatccctcccccttccctttaatggtaacacttatcaccacctgctgtggtgactgcttacatgtccagctcctccactggattttgatctccttagggaagaaccatttttacccacgtttgaccctcaacgtggaatgacatcacaccctcaggaagagaatgaatgcaaccatatgaacagcgctagctctccagagggggctgggcttgagcccgtgggacactgcccaggtcatttagctccttttaacctccccttcagcaaaacaagtaagttaacaacaacttcataggattgccaataaagcgtgttataaaatgtaaaatgatgaaaatgatatcttgttccgttttttcattggttcagggatgcacatgcttccaaatttaaacatctctgaaattgaaatctgtcctacaatcacgtataagtatgcatcacagtgtaattggcaggcagggttttttttgtttgttttttggtttttttttctgtgttagtgtcaaataaaatactggtgcatcttataagcaaaagtggctaatatccaatgaaatattctctctctctctatccatgcagtattctgcctctgacaaatgtccccaaactgtgtaagaatcaactaccttatttgtcaacctcaaaatattccctctacagccctcatagcatcctggttgcttttaaaaactttttattcatcttacacagataaaacgtaggctaggcacggtggctcatgcctgtgatctcagcacactgagaggctgaggcaggcagatcacttgaggtcaggcgttagaggccagcctggccaacatggtgaaatcctgtctctactaaaaatacaaaaattagctgggcctggtggcacatgcctataatgccagctactctggaggctaaggcacaagaatagcttgaacccaggaggtggaggatgcagtgagctgaggtccagccactgcactccagcctgggtgacagagtgagactctgtctcaaaaaaagaaaaaaaaagtaaaatttacattttaaatgtacccaaacctttctggaaagtatttgtattttgatttccacatacactattatagttacagaatttagtacagtacttaatcttatttgtctttactttctattccaatctttcccaacccctcataaaaagctttatgtaaggggaagaacgttgcggtgttttggaaagaataatttcagttttagtcctgttttgtcactaattagctacatatctaatctctctgtcatctgcgaaatgaggatgctaatattttcctaacaattatgcagcaccaaatgagatcatatatgtggatgttttcttaaattactatattctggccaggtgtgatggctcacacctgtgatttcagtgctttgggaagccaagacaagtgaatcgcttgagaccaagagtttgagaccagcctgggcaacacagcaagacctagtgtctccaaaaaataattagctgggtgtggcagcatgtgcctgtagtcctagctacttgggaggctgaggtgggaggatcgcttgagtccaggagtttgatgctgcagtgagctatgattgtgccagcgcactccagcctgggtgacacagcaagaccctgtctcaaataaataaataaataaattactatgttctagaatgatgaataggtagatctccattctctccccactctcagccccccaccccacccccataattttaccaatcctggacagcttccaaagacaacacttcagaagaaagtgtgtcttctaaggtgcattttattacttcctatagtcatccacctgatcactgggatgatttctgctctccaaacatctccagggcaaggaaaacaaagccactaattgttacagttgactgcatccagtttccagtaaggatgtgaactccattgctttaaatgtcagggtcctctgactttgcccattcctgcaggaactgcttcctttgctacagcctgctacgggaggcttttcttcatattttcaagacagtacaagctttaacttgagattgtttcttttaatgttacttaccagagacaaactcctttttatctgtgctgttaaagtagtaatcatttgtggttttcgtttcctttcttttcttttttttttttaagcgacaaaatctttttgctttcccctattttgcacacaaccaaaactgcacttgtctttgcttggtttaggcttaaattatggagtgggagtggggtggacattaggacattaatagatatttagttcccactcacatcgcctcgtctctgtgggcctctcacaacaatctgaaaagatttagtgttctatgtttgagttgagggcactgagatttgtcagaaatcataggatcagaactagacccagattttgtaattctggaagctaaatctcatgagcacagaccccctaactttttgttttcgatttccaattttggttttgtctataaggaaaagggctggtgggggtggggagcgggctgaaaagaacggtatttgagcaggcatttggcattatacttttaattctcttaaaccagacctcctcttctcctttctgttatcacttcatttcatgttttattcctgaaagcgaacttgtcggcggatcattttcctttacatctttctggaactgttccagattcttatggcattacaaaaaaagtatctgcctaaaggcgttctataaagcagacagccttagagaaggtgtgggtataaattacatgaatgagttaatacaaaactgctaataaaatctgtgacatgggaaaaggcagagggtataatttgctgcagttatttagttccagctacaaaaactaaagatacacacccacacccacacacacatatatataaatatatatgtatatgttatttctttagactacaaaagtaagagagacttacctaaagacggaaaaaaaatctcaacgttgagaatttgtttgtataagctcacaaagaaaaaacttctttttgactttagagtgtgtttttcttggaagatgaaataagattacagtctccactggtcaaactttgtggttagagtttataagataaaattcttataatgtattaaatcttcttcatttcacaatgtgttttgtatggttgattaccgtattgtttcactacttttgtagtcaagtttttcatttctacttttgttaacttttctctctgatgaataaagaaaattcctctgtaaatccttatatgagaaagaaagaaagtctatgaaattaatttgatttcttaggttcgcagatgcaaaaaacgttatattcctggtttcacataaaaaccatattagggtaaatgatttaagaacataaaatgaaaattccagcataaatttgggtgaacaaaaagagtggtgcagaaaacgtaacacatttggagagaaagggagaagaaaatatatatattaaaagttaggcaagcattttattaaagtgaaagttctaaaatatcagtacacagagtttttagggggagaaattggtttatcagaaaacagagccccgttattttatttattcttcccaccattcacaaattgcctcctcgtgaagcgaagtggcattttcctggggcagaagagtcccattataaatgcagcagaaagaaaggatgcttctttggacttatctcctagcttctctgcggcctgcggggactgagagggtgggcgagctggtgtccactttgtatttgaatgagctttcccgggcgaaggcggggtggcccgcgcagagtgctgctgagacacgtttggtgcccatcgagtgctcttggtctcatggctttagagtgaaaatgcccgctcgttaatgtgtccccaggcgttagaagtacagtttagagccaggaaatgtggcctcccccgccgggctcctggctacgccccggcaccccaccccgacccccgccccgccagcacctgcttttccgctcccgcgccccggaggtccccgggctggagctggggcgcgagctggcagcggggagtgggtggcgcccggaccgtcgattgcgggcccgtcccgggaactgcagcgccctccccacctgggcagggcagccccgccacccgcccgggcctcgacgggcgcgccgccagggctggggaggggcggcgcggagggcgggggccgggcgcagggcagggcccggctgtgcctcgccggccgctcgggcagctcccgggccgcggccagccgaggatcagagcgcttgccccgggggtctgtcgcgtcgcaggcgccgccggagccctggccatgaggaccctgtggatggcgctgtgcgcgctgtcgcggctgtggcccggggcccaggccggctgcgccgaggccgggcgctgctgtcccggccgggaccccgcctgcttcgcccgcggctggaggctggacagggtctacgggacgtgtttctgcgaccaagcctgtcgcttcaccggggactgctgcttcgactacgacagggcgtgcccaggtgggtggtcaggccgagagtggggcgccggccgttagcctgcaaccaacgggcacagggcagggcgctgtgccaaggacctcagtccctgagccaggtgtcctccagaccctttatccccacccatccccaccaccgccatccaggtacgcccggctccgttcatcctagggtctcccagtcccctgctagacatcgaagtgtccccccacccccaagacagaccagagcccggatggaagggctggatcccgctgttctccagcgggatggaagggagccgagagacgaaatctccgactcagaaactccagctggatagggccacctctggccggcagagatggcactgacagataaggggcatgcccctgggccaggctccaccaccttcattctgtcaaccctcggggatctttggggctggtgaggggtgatgagggcaggattgtgtaatcttcccactttgtgccaagggcgtgctctgggaaggtattaatactttcttctggagagcaaggtcttaaaaatctgaagatgtcctcatctctggaccccaaaatgtagaacagcctctttctcctaggaggtgtacagtatgttcttggaatttaattttctctgtacagcatgacaaggattttatctcgaggtccctattatgttgtaatcttgctggttttcc

SEQ ID NO: 236 - DNA, 6000 bp, Homo sapiens
gggtactatttttgcaacttttctttaaatctggtattattccaaaataaaaaaatcgaaaaattccacaaacatataacattttgaactatttccttctaagtatcatatttatatattttgtaagtatataaagcacataattgggataatagtcttttgtacttaacactgttttttattaacttggtattgaatcataagcagttttcaatgtcatttaaaattatttaaaaacaattgttaatggatgcataatagttctttgtgtagaggtttttttttgtttttttttgatagagtttccttcttgttgcctaggctggagtgcagtggcatgatctcggctcactgcaacctctgcctcccaggttcaagcaattctcctgcctcagcctcctgagtagctgggattacaggcatgcaccaccatgcccggccaatttttgtatttttagtagagatggggttttgccatgttggccaggctggtctcaaactcctgatctcagatgatccactcgcttcggcctcccaaagtgctgggattacaggcttgggccatagtgcctggcatgtggaggtattttaatttatttatttagggttttcctcacattatgtcataaacttacagtaaaacctacaattaacatctttttgcatctatctttgtccatatatttatatttgattagttacatatcctcatctcctagaatgagaactgctttgctaattttttaaaaataattttattttatttttagaggcagggtctcactctgtctctgaggctggagtgcagtggggcaatcatagattactgtaacctcaaattcctgggctcaagcgatcctcctgcttcagcctcccaagtagccaggactacaggctcttgccaccatgcctggtaattttttttttctttttgagacggagtttcgctctgtcgcccagtctggagtgcagtggcacagtctcagctcactgcaacctccgcctcctgggttcaagtgattctcctgcctcagcctcctgagtagctgggatcacggacacacaccaccatgcctggctaatttttgtatttttagtagagacagggtttcaccatgttggccaggatggtcttgatctcctgacctcgtgggctgcccacctcggcctcccaaagtgctaggattacaggtgtgagccaccgtgcccggccgggagtcttattttttgtgggccctgaaatttaaaggaaaagttctaaaaagtcactgagcatgtgggatgcaggctatctacagtctgatgagggaagttcagttcagcttaacatcctctggggtgtactttgtgctgagactggttctagggacacagatatgaatcaaacactgaacctgtcaaacaggggcttacaatttggtaggggagacatataagtaaatagatactgactgtagagtgatgagtagttacaaattgggaagcacaaggattaataggagcatggaaggggttttgtgtcttcctttaaacaaacttttatacagtatttacttgttttttttttttttgaaactgagtcttgctctgttgcccaggctggagtgtaatggtgcgatcttggctcactgcaacctctgcctctggcgttgaagcgattctcctgccccagcctcccaagaagctgggattacaggcactcgccatcatgcctggctaatttttgtatttttgtagagacagggtttcaccacgttggccagactgatcttgaactcctgacctcaggtgatccacatgcctcatcctcccaaagtgctgggattacaggcatgagccactgcacccggccagtatttactcttatatccaaatagaatatgcattcatcaattcttcctttttttcattcagttcacttataatttattgagcatatatcctagaccaaagtgagtggcagtggagttggacaggagaagagaaatttaaaaagcaaaaaagtaaaatttatcaggctttgtaactacttgcccaggagaaagacacaagagttaagaatgaatccaagatttttggcttgggcatctgggtggatgatggtgccattcgccaagtcaggaaacgggtatctttttggcctgaattttaaaaactaattttaaagagcaaagaatattttgcttggggtgctagtgcttaaactcagttgaaaaaagattcttagaatattggctttctacaggatgtagacagtataaaaatgaaagtggggaggtctaccaggttgggaatagacattttacggttgctagctaataggggaaatcaatgaaaaattgagatgagggtagccaaatcaattgacagaagcccaagggagattaaaatgaacaagagatttacagtacaagagaggaaaacaggtgagagacattttagaagcagagggcaaactgaaaacgatggaatgaaattgaagaggatgaaatgatttaaagtggactactccgatcagcggggaggttgtgatgataaaggcagctgctttcagcaacaaggagagaaagtgtgaagcaagaggaaactggtcttgggaacaaatgaatcatcttcttcatgtagtagctatgccctgggttgcatgattattcataaacaaatgcaggtttcctgtggtggcagtgatctaggcatgaaaaatacagtgctaatattaggttacagcgctaatgatctcaatcagttgaagggcccttttcccttgactaaacattttttagcaacaaatgacccttacagcattttgttaatattgttgaaaggactgttggggcatcaggttggggactgaagggaatctcagggtctacttccagctcttccttaggttggatatatttcacatgtaaaatggtagcataggacctaactcatagaatcactgcgaggatgaatcatggtttccctttgagccccagtttctcttgttatagaaagggcatagtgatttttttgtgactcaggagtatgtggcaaaggcacacttaggattatgcaggaacagctttcattaagagagctactaggtgacatcttctccatggtggctgctcaattattaaatgaatgattcctggagaccttttgtagtttctattatttatcatcattaggccataacctaaggtaaggtgagattgccttataacattttttatacataaaaaatactggttgcatgctgctatctgctgtgcaacagaatgtcataggatccagtgtatgaggctctattcttccatggaggggtgttacataaacccattagtgaaatttagggaaatttcacccagactagggaggatgaagaatggagcatctatcttttgacagaaatacagttacacacacacatacacacacacatacacacacacagagagagagagagagagagagagaatgagaaacaaaaacagaggagtacaaaattgagcctaagaaaaagaactggaaccaataaaaattgtaactaacatttattaagtatcttctatgggccagtctctttatctccaatcttcaacaaccagcaaggcaggcaggagaaaactgaagttcaaaaatgttacataacttccccagggtcataaagctatatatacatgacagaactggaactggtagtgttggtatgtgtctgacaccaaaatcactacacattctagtataccactctgttaaaaaagtgtatttggaaaatttagggatcagaggatttggagaattttctttccctacttcccctctgacagtcgtgtttgtttttggttctgatgtttgcaccctagaggctgactgggatcaaatatggggcatctgtaaacagaatgattccatagcccccactgtgtaataatttccttccttcagagccttactaggatttgcctgggatgaggggtggaaaggtgggagagaagaggttgggagggagaggatgttagtaaaagatgggtgattctttgcttacctttaagttgtttatgaatttcaggacaacccgttggctattctcttctctggcttggcatatatatatatgtatgtatttttttttcatttttgttttgtgggggtggtggtttaggtgttaagggtttggttgatatctgtagaaaatttcttaatgatctacacagtagataaaaaaacaagttaaggtcaaagacaattccttcgtctgttttgggagacgagtgtgtatgtttgaaaaaaaggtttgttctgggtcactcttctttcatccagacgcattaaaggaattagaagggggtctccctgccacccccgaaaccgtgagagtcaaacggagattcccttatattcctgctctcaggtgcgggtccgagtgacaagaacgttcacgtatcttcgggagagaacgaaaaggtgctcgggtctggcgggggcggggaacgccaggggttggtgggaactgaggggcttccggttcccgggaagcggagtcccgggccggccgcgggccgcgggctacgcagggagcacggggccctcgccgcccccaggccgcgctccttagcgttccctgcggctcgtgcccagcgcggccgccgcagtcccgacgccgtagccggacgtggggtccagggggcgctgtggcccagcggcgccggcggcaggagcggccacccgacgctggaggcttcgctgaggatccccgcctgccgcacctcggtcgtcccgccgcagccttgcgcccccggcccggctcggcggcgctcctccgggatccgcgtggctgccgcggcccgggcgccgatgcggctgggcgggtgccgggccttagcagcagtagcagccgcagctgcggctaccgcagctcctacaggagtgggaggtttcgcggcggcgcctggggccgcgccggtgccctccggaggaggctttcggctcagggacgacccccgtggccatgctgaagcggaggcggccgctgctcgaggtgagtgtggcgcggcgtggtccggggctcgccggcctcccgccgcctgtgggggccctggcggcagaccgcgggccgggcggacggggcgtcctgccactgcggtcgcctcccccaccctgcggtcctggggcctcagccctttctccccgcgtcccccgggaggctgaaggccgtggggggcgattaggccccgcgccgttgggaagccctcgctccggcctcggttccggcgcggccgggtgtgtggagctgggggccggcaggagcacggccgcctttcgggtttgcatgggcccgggccgagcgcagcctcttagcccgggccctgcacgtacatcccggagggaggcagatgacgcctgtttgcaaacaagctttggcttccacgcgtcccataccgagtccctcagaatcccggttgtggcggggaaagggggaggagaggaaggccagggtgagaattgggggtgcagagagtgcgggaccaagagagcccctgctactcctggagtgtcattcatggatctggcttgctcgagaacaaccttttgcgtcttatttgaggtgaaatttcatcacctgccggttgctcattcctgcctctttatattatatcttgcctctaagcgtggtctgccttggagaaagccccatcgcatctttgcgatgctaagttttgtagataaacactcacagttataaaaacgtcttttacaaaggtctgccccccacaccccgccagaagaaatatttttatgcttcagtgttcggtacaaaaatgttccacttaaagagatccagagaatagttggcaaaaggattttaagtcctctttaagtgccagctaccctaataaatacctgaaggaaatgggatacatgctaaattttagaaataaaatgatttgttctgatattaatgttgaaaatgctactgattacagtttgataccgtaagtcagatattta

SEQ ID NO: 237 - DNA, 6000 bp, Homo sapiens; identical to SEQ ID NO: 2

SEQ ID NO: 238 - DNA, 6000 bp, Homo sapiens
cccagggatgcaaatatggttcaacatatacacatcagtcagtgtaacatatcatatcaacagaatgaagaagaaaaaccatatggtcatgttaattgatgctgaaaaagtatttgagagaattaaacatctcttcatgacaaaaaccctcaaaaacactggagacagaaggaacatacctcaacacaataaacagacatatatgacagactcacagctagaatcatactaaatggggagaaactgaaagtcattcctctaagatctggaacaagacaaggatgctcattttcaccagtgttagtggaacatagtactgaaagtcctagctagaacagactagagacagaaataaggggcatccaaactgggaagagagaagtcaaattacctttgttcgcagatggtatgatcttctgtttggaaaaacctagactccataaaaaaatgattagaactgataaattcagtaaagtttcaggatacaaaattaacatacaaaaatcagtagcatttctatatgtcaatagcaaacaatctgaaaatgaaatcaaggaagtaatcccatttcccatttgcaatagctataaataaaattaatataatctcatctcttcaataagtggtgttgggaaaactgcatatccacatacaaaagaataaaattagacccttttaatatacaaaactggacccaagttaatatacaaaaattaacttgaaatgaattaaagacttaaatgtaagatctgaaaccaaaaactcctagagagaaacataggggaaaagctccttgacgttggccttggcaataattttttgggatattacaccaaaagcacagacttttgaaaaaataaacaagtaggactacatcaaactaaaaagcttctgcatggcaaaagaaagtcaacaacatgaaaaggcaacctacagaatggagggaaatatttgcaaaccatatacctgatgagaagttaatatcaaaatatagaaaatatataaggaactcacatatctcaataccaaaaaaataataacctgttttataatgggcaaaggacctgaatagacattttttcaaagaagacacacagatggccaacgagtgcaggaaaaagcgttcaacatcactaatcatcagggaaatgcaaatcaaaaccacaatgagatatcactccacacctgttaggaaagctattatgaaaaacacaagagacaatgaatattggcaagggcatggagaaaaaagaacccttgtacactgttggtagaaatgtaaattgcaacagcctttatggaaaatagaatggaggttcctcaaaaaataaaaatagaactaccatacaatctagcaattccacttatgagtgtacatccaaaggaatcaaatcactatgtcaaagagatatctgtacttccttgtttattgcagctttactcacagtagccaagataaggaaaaaatctaaatgtccatcaacggataaagaaaatggggggaggggtgtgcatgtatacatacacaatggactatttttcagccataacaaagaaggaaaccctgccatttgtgacgatatgaatgaacccagaggacattatgttaagtgaaataagccagacacagaaatacaaatattgtatgatctcatttatatgcgaatctaaaaatttcaaacttgaagacgaataagtagaacagtatttatcaggagctaggggatgtggggaagaagcaaaatattgggcaaagagtataaactttcagttatgagatgaaggccaggtgcgatggctcatgttggtaatcccaatactttggaaggctgaggcagagggattgcttgagaccagcctaggcaagaaagtgagacctcatctctacaaaaaataaaaataaaagaatcagctgggagtggtggcatacacctgtagtcccagctagtcaggaggctgaggggggaggatcatttgaaattggaaagtcaaggctgcagtcagccaagatagtgccactgcattgcagcctgggtgacagagcgaaaccctgtctcaaaaaaaaaaaaaaaaaaaagatgaataagttctggggatcaaatgtacagcatggtgactatagtttataactgcgttattacttgaaattggataagagcagattttaagcatccccagcacccccccaacatacacacacacaaatggtaactataggtggtgatagatatgttaatttgactgtgacaatcagcattcaatatatacatatatcaaatcatcacattttaccccttgaaatagaaactttgatttgtcaatcaaatattttaaaacgaaaataatcataatattaatatagcatacaggaaaaaatttcgtatctcgactgatacagaaaatttcatgataaaaacactttaaaacaaaagaaataaaagggaactccctcaacctgataaatggcatctgtggaaacccccagctagcatcaaacttaatacagaaaggctgggtgttcacctcttgaaccaggaacaagacaaagatgcctgcttttgccacttccatttgaccttgtactgaggttctggctagggcaattatccctgaaaaagaaataaaaggcttccaaataaaagaagaagtaaaactatctctactcgctcatgacatgatcttgcatatagaaaatgtgcacatgtacacacacacaaaccattagaactaataaacaagttcagcaagtttgcagaatataaaatgaatgtacaaaaatcaagtgtttttctatatactagcaattaacaatctcaaaatgaattaaaattccatttacaatagtatcaaacataaattatttagaaataaaaagtgcactgaaaactacaaaatattttgaaataaatcagaaaagatttaagtaaatggatcacttgaacctgggaagcagaggttgcagtgtgccgagattgtaccactgcactttagcctgggcaacagagggagactccaaagagtcgaaaagaaaagaaaagatttaaataagctgaaacatattctatggatcagaagacttaatattgttaaagtgacaatattccccaaattgatctacagcttcaactcaacccctatcaaaatcctagcttgctttttggctgaaattgacaagctgattctataatttatatggaatctcaaaggatccagaataaccaaaacaatattgaaaaataaagaacagcgttggtggattaacattttccaatttcaaaacttactatagcactgcggtaatcaagcagtgtggcactgtatagcatgtacattacagatcagtggactagaatcaatgtccagaaataaaccgttatgtttataatgaattactttttaataaggtgtcaagacaacgcaatgggaaaagaataatgaattcaacaaatgatgcatggacaaccggacatgcacatgcaacacaatgaatttgaattcttctatcgctccatgcataaaaactaactcaaaatgggtcacggatgtaaatgaaaagctaaaactataataatcctagaggaaaacctaggagtaaatctttaagatgttattgtaggcagtggtttctcagataggaccccaaaatcacaagcgacaaaagaaattggacttaaagttaaatacttttgtgcttcaaacatcatcaagaaagtgaaaacacaacccgcagaagcaataaaaatgtctgtaagtcatgtatccgattagagacttctatccaggatatataaataatgcaattcaatgataaaaaagataaatagcccagttttccaaagagtcaagcatctgaatatacatctctccaaaaatatacagatatccaacaagcatgtgaaaagatgttcaaagccatttgccaggtgcacaaacccaagacagtatgaggagatgctacagggactctgctgcttcacagacatgaagcgttggtgagaatgtaggcagccgcctttggggacttcacatccccgccgccccacgcacggtgagctagtgtttaaacttagccgagatcaatacacgcgactgtgtgcccgtcagaccctgcgctgccggcggggctgggagaggcgggcgccaggagtgggcgggaacctgggggtcaggccccagccgcgggaagccgcccaggagcgcgcgaaaccttctccacacccttccaggcatttgcccgccgcgattcagagagccgacccgtgacccctggcctcccctagacagccccgcatgtccagatgtgccgtcccgcctgcctcccgcgaccactggccatctctgggcctgggcgcggtctcggcgcccgcctgcccccgccaggagccgcaggtccagccagtgaagaagcccgcgctgaaggagcctctgtgctccagaatccatcctcagtatcagcgctggggtggcctcctccaggaagcccttctgattctctcatgggtcgctcttcctctgcagactcccggagcacccctgctccaagtaccgcaagtggcactgagaacttggggagagcagaggctgtgcctagatttgtagggagtccccgcagctccaccccagggcctacaggagcctggccttgggcgaagccgaggcaggcaggcagggcaaagggtggaagcaattcaggagagaacgagtgaacgaatggatgaggggtggcagccgaggttgccccagtcccctggctgcaggaacagacacctcgctgaggagagacccaggagcgaggcccctgccccgcccgaggcgaggtcccgcccagtcggcgccgcgtgaagagtgggagagaagtactgcgggggcgggggcgggggcgggggcgggggcgggggcagccgggagcctggagccagaccggggcggggccgggaccggggccagggaccagtggtgggaggaggctgcggcgctagatgcggacacctggaccgccgcgccgaggctcccggcgctcgctgctcccgcggcccgcgccatgccctcctacacggtcaccgtggccactggcagccagtggttcgccggcactgacgactacatctacctcagcctcgtgggctcggcgggctgcagcgagaagcacctgctggacaagcccttctacaacgacttcgagcgtggcgcggtgagcgcgggcggggcacgggtggagcgcgggctgaggtgcgtccgggacccggtttggacggcagaggcctgggcgggggcgccgagggcccgtcggggcggcccggacaggactgggggtgtccaggaccctgtcagggagggcagaactgcggtggggcgtgccctgggctcccagtggccggtgggtaccctggtgggcaagcgtccaggacccctcgcggcggccgcgacccctgtcggaaacggagacttcccgcgtgccgcctgcaaggcgtcttccctgggaggagaaggcccaaggtttcccctccacttcaagatctgggctccgaggctccggagcccccttcactgggccgcgtttcttgtgccacctcttccttaggctccttctgcaggtcgcacagggagggagaggcagatgagtcatgctcacagaactctgagggcacctcggagcagccagctgtgagccgtggggaagggtgcacgtcagcgggtccagaggcctgagttctgtccagacatgaccaccagctcactctaccgtctgtctgggcctcagtttccccagctgaaaatggagggttggcttcagtctggtccatgagtcatgggtgagcccaggcccatctggtggctcagacggcacctgggcagcttacattctcaggacagtccccagaggaaattaaagggaaggaacagaacccaggccaggagaggcttttcctaaatggaggggctgcactccctcccagcagaatgtacaccagggaacacttccacgctaggtgtgaggac

SEQ ID NO: 239 - DNA, 6000 bp, Homo sapiens
tggagaaatacagggaaatacaacacgaagaaaaaaatcagataaacccagaagaagagttctaaagaaaaattgacctggtctatcaacatgacaatgtcaaaaatgggggaggggagacaggagatggcatctatgctaatttacagagattaagaaacataacaaaggccgtggttttttttttgtttgtttgtttgtttttttttttttttattgatcattcttgggtgtttctcgcagagggggatttcgcagggtcataggacaatagtggaaggaaggtcagcagataaacaagtgaacaaaggtctctggttttcctaggcagaggaccctgcggccttccgcagtgtttgtgtccctgggtacttgagattagggagtggtgatgacacgagcatgctgccttcaagcatctgtttaacaaagcacatcttgcaccgcccttaatccatttaaccctgagtggacacagcacatgtttcagagagcacagggttgggggtaaggtcacagatcaacaggatcccaaggcagaagaatttttcttagtacagaacaaaatgaaaagtctcccatgtctacttctttctacacagacacggcaaccatccgatttctcaatcttttccctacctttccccctcttctattccacaaaaccgccattgtcatcatggcccgttctcaatgagctgctgggcacacctcccagacagggtggtggccgggcagaggggctcctcacctcccagtaggggtggccgggcagaggcgcccctcacctccaggacggggcggctggccgggcgggggctgacccccacctccctcccggacggggtggctgccggcggagacgctcctcacttcacagacggggtggctgccgggcggaggggctcctcacttctcagacggggcggctgccgggcggaggggctcctcacttctcagacggggcggccgggcagagacgctcctcacctcccagacggggttgcggccgggcagaggcgctcctcacatcccagacggggcggcagggcagaggcgctccccacatctcagacgatgggcagccgggcagagacgctcctcacttcctagatgggatggcggctgggaagaggcgctcctcacttcctagatgggatggcggccgggcagagacgctcctcactttccagactgggcagccaggcagaggggctcctcacgtcccagacgatgggtggccaggcagagacgctcctcacttcccagacggggtggcggctgagcagaggctgcactcccggcactttgggaggccaaggcaggcagctgggaggtggaggttgtagcgagccgagatcacgccactgcactccagcctgggcaacattgagcactgagtgaaccagactccgtctgcaatcccggcacctcgggaggccgaggctggcagatcactcgcggttaggagctggagaccagcccggccaacacagcaaaaccccgtctccaccaaaaaaatacgaaaaccagtcaggcgtggcggcgcgtgcctgcaatcgcgggcactcggcaggctgaggcaggagaatcaggcagagaggttgcagtgagctgagatggcagcagtacagtccagcttcggctcggcatcagagggagacggtggaaagagagggagagggagaccgtggggagagggagagggagagggcaataaaatttatgtatatataaattattattgttgctgagcaaggtggctcatgcctgtaatcccagcactttgggaggccaaggtgggtggatcacctgaggtcaggagttcgagaccagcctggccaacatggtgaaaccccatctctagtaaaaatacaaaaattagccaggcatgatggcaggtacttgggaggctgaggcaggagaatcacttgaacccggggtcggggggtgtcagaggttgcagtgagctgagattgtgccactgcactccagcctgggtgacaagagcgaaactccatctcaaaaaaaaaatattactgttgttggttttttctctcttattattttttaattaaatttaaaaaagttttggtcgggtgcggtggctcacccctgtaatgccagcactttgggaggccaaggcgggtggatcacaaggtcaggagatcgagaccatcctggctgacacggtgaaaccctgtctctactaaaaatacaaaaaattagccgggcgtggtggcgtgaacctgtagtcccagctactcaggaggctgaggcaggaggatagcatgaacccaggaggcggagcttgtagtgagctgagatcgtgccactgcactccagcctgggcgacagagcgagactctctcaaaaaaaaaaaaaaatttttttttgaggcagggtctttgtcacccaggctggagtgcagtggtgcaatcttagctcactgcagcctccatctcctgggctcaagggatcctccctcccaatcccctgagtagctgggactacaggcagacaccaccatgccaagctcatgtttgtttgtttgtttgtttgtttttgagatgcagtcttgctctttcgtccaggctggagtgcagtagtgcgatttcttccaggctggagtgcagtggtgtgattttggctcactgcaagctctgcctcccgggttcaagcgattcccctgcctcagccacctgagtagctgggactacaggcgcccaccgccacacccagctaatttttgtatttttagtagagacggggtttcaccatgttggccaggctgtctccaactcctgaccttaagtgatccgccagcctcggcctcctaaagtgctgggattacaggcgtgaacctcttcggccagcctcccagcttatttttgtattttctgtagacacgaggctttgccctgttgcccaagctggtctccaactcctgagctcaagtgatcctcatgcctcagcctcccaacgtgctgggactacaggcatgagccactgtacccagactattgttttttactaaaggagacttactagaaaactgacaaaatccaggctgggcgtggtggtttacgcctgtaatctcagcactttgggaggccagggtgggtggatcacctgaggtcaagagtttgagaccaacctgaccaacatggtgaaaccctgtctctactaaaaatacaaaaattagccgggtttggtggcgcacgcctgtaatcccagctactcgggaggctgaggtaggagaaccacctgaacctgggaggcagaggttgcagtgagctgagatcgtgccattgcactccagcctgggcaacaagagcgaaactcggtcttggaaaacaaacaaacaaaaaaacctgacaaaatatcaaagataattataacccttaggggtcccagatttctcttcctcaggaaatggcaagggggtgcgggagaggggccatccgctttggctggcttagtttcctttccacaaccctttctggagaaacactaaatgccaccattttttggtccttggcctggaaatttccctatctgcaccccctgcgctgtagcttaggctattcagcagagatctgcaggctccagcgggcgtcggacttacagaggcaaatgtgaccatgtaaattcccaggcccacccgtgacagagagcctctgattcagcaggcctcctttgaggctggggattttaaacccgcgtcctgtgattgggatggggattgagggctatattcagcgcctggccaccagagggcgcagcgggctgggttcagcggtacccctttgagatcttgtgtctcaagacaggttgctgtcatcaaggatttgctggttagacaacaggcaaggggtgagctgggtcctcttgggcaggagcctagtaggaagaccgacaacaggaaagaggctcacatctgatactgggcacatggctgggccttggtcctcgtgctcccggacttcagagctcagaggggccagggcctggcctagcctggaatctggatggacctcttctgccctggggcgcgccgtttacccaatcctgacctcagagagcgtctgtcgttctggtgggaaaaccgagacccagacaggaacaagggctcagtggcaaccgctctgcctcccagcccagggctctgtcttgccggggctggggcacagggtggaccccaggaagttctgctatgagtcagcttcgagtgctcaggggaccggacagaggctgctggccggggaaggatgccggccggcggtacctacttccgcagctgtgggtatccctgcctggtgattcagcttccctctgagggtccccagggggcgccgccctggactgggaggctggggaggatgctggggctacggaggggcgatggaggtgccttaagggaccccgtaatccagctctgctggatgctgaggtcccacgagataattgtggccagagatcaggtgggcgtaagactggtcctaggatgggggctgtgggcccctcctcactaccctgcttcttgaagatagcctgggcggctgtgcgggataccccagtgtctccagcaatgcgcgttcatctccatggagggctcgccttggcgctgggtggggagcgacttggtcccccctggcggcgaagagaggctgaccacgccagctcgtgggggggtctactgggcagatgcgcaggccccgggcggaggagggctgatgggggaaatgccaggccgatgggggaggggctgtgagcgggaggcgttggggcggggcaagaccgccctcccggtccgggggcggggcttggcctggggcggggcttggctggggtgctcagcccaattttccgtgtagggagcgggcggcggcgggggaggcagaggcggaggcggagtcaagagcgcaccgccgcgcccgccgtgccgggcctgagctggagccgggcgtgagtcgcagcaggagccgcagccggagtcacagccgcagccagagccgcagccaaagcctcagagagcaggagttggagcgcaggccctgctggatccgcgcctagctcgccgccaggcaccggccggaggacgggccgtggtgtcagctcactgcccgggcgctgtgggaggcagcgagcccgcgaccccccgggccgggcaccgccaggcgcggagcccagatcgcccccctgccaggcctggtcacggccagagcacgcaggagttcccagggtctggatctgcgcgcaccctaatgacctggggactgaagagaaaaaaggaacgaggatttcatctaaaagcataacgtgggcactaggcgaggaggaaagtggagaccacctggcacggggcagaggtgcctggagcccacgcttgagcatcggagaccctggcatcctagcagccgcgaccttggctctgccctgtctgagctggaaacacagcttagcttctagacatcgctggcacaggcctggcacaagtaagcagtgtcctcacctgtctgaaacgggacacggggtcggaggaaccaggatctagcctggccccaagcggaactctctggtggcccagaggtcgtcactggggagcccgcctcctgccctagcctcactggtgcggatgtgccgctgcccgccggagcaccatgatggcaggatgacctcagccgaagtaggagcagcagctggtggtgctcaggcggctgggccccccgagtggccccctggcagccctcaggccctccggcagcctggccgggcccgagtggccatggcagcactggtgtggctgctggcgggagccagcatgtcaagcctcaacaagtggatcttcacagtgcacggctttgggcggcccctgctgctgtcggccctgcacatgctggtggcagccctggcatgccaccggggggcacggcgccccatgccaggcggcactcgctgccgagtcctactgctcagtctcacctttggcacgtccat

SEQ ID NO: 240 - DNA, 6000 bp, Homo sapiens
agtaaagagtgcagaaatgaagcccaaaaaactgaggatggtgggcagaagggaacgtgagtggctggagtcgaggatggaaggagcagaggtgagggatgccgtctgagctggaccagaaaggctaccaggaggaggtggcctagccaggctctcagctaccccaggtgagctttaaagctcttgggattctcagaaggcaggccttgtgttcacaaaacacattaagaatctgaaaaccctcctatggaaactggatgtccatggattctgttggaggaaaaaaaaatccgcaccctccccccgccccccacccccaagacagaacttcatgctttggctgcgtttctgagcttcggccggcagtttccgagcccatggagtcccgccgtcaagctgcggttggccggcctctgctcgggcactgacatcatgcaagggaaggaaatgacagtggtcccgtctcccgcccaccatatctcagttgtaaattctccaggcacgtcttccccggggtaattatagcccaagttgcttttaggaggtgatatcatttacctgtttggcctctgtttctgtcctacgcgggttgccgggcagcacggggctggtgtgggagtgggacgggtggccattggcgctcacaatggccttgagtcatgactgctcactccttccatgctcctttccctcccctgggctgctcatgagtcaacagcacttattaaacccctctgaatgcagagatttgtactgggccaaccgaggggcagggcaagctcagtgcacccgggctgtgtgggtgccacgacctctaccaatggagggcaaccctgggcacctgtgtatttctattttgtaaaaagaaacccaatctcctttctgccacctctctaattctagattgtgtgttgaattcatggagtgagctctggtttgaggggtgggggtcaggagagctagactgaaagcctagtttgctctcctgcctgaccttaagccaagtacatcacctctccaggtgtgtgcacctgtgaaatggggactgataaagctggcccccccaggtccagttgacatgcaggtgagggctgctgagaaatctgagagcagtggtgctcaactggggctggttttgtcccctggaggatatttgacaacatcaagaaacatttttagttgtcacactggggctggaggcagagggtgctgctggcatctcatgggtgggtagaggtcaccagggtgcctgcaaaatgtcccacactgcacaagccagctcccaccacagaggatgatccagccccacacatccactgtgctgagacatccactgtgccccacgctagagctcctttattagaagagacctttgcctccctggcctggactcaccaccgccaggcgctgggcctcttggtcctcgcctaccatccaaagggagacacttcagcctcactttacaaaagaggaaatctaggcacaccaaggccatgcggttggttaatggggagcgaggttcttgttccggtccatggtcttggtaaccagtccctgtgtctccataatttggggcacctcgttcttcctccctttgtaaagtttggtttgttcaacttcccactgagttgcagacagcttggcccgtgctctgaggtattcttccctgtgggcaatgccaacgggatggaaataaaatatcgttgaaaagggctcccctgtgctgcctcctaccaggaagccaccctcctgacagcttgttggtctgcgctccttgtcacctgatgcttgcatccccggtgactattaaaatgtccgcaaagtgctcgcttcggcagcacgtatactaaaattggaatgatacagagaagattagtatggcccctgcgcaaagatgacacgcaaattcatgaagcattccatatttaaaaaaaaaaaaaaatcagcaaagacacctgtacctgtatctgttggcacatgccatcaaatgacactgaagagcaacactgtggccaaacaggccagctgggaggcccggagcttcccataatgaaatgcaccatctagacgaattagacaagggttttactaattcatgagcagggaattaatcctgcccacaaaatctgtccctgtggggttttagtgataaaaatcactgagacaaaaagaaaactgggtgcaacagtttatggagagcccccacgtataagcagttagtgactggagtggagagagaatcccagcaaagtgacccataggacacaggcggggacagggaaccagagaagagaaccatctatggaacaaaaaggaccctgtaaacttgtcctggcttgggagatatctccagctacaggaattcttttcccgctcctattttggggggctattgtttttactttgtgtcggtccctgaaatccctagacccacgaacccccggcgaaggccacgagaggcctggaggcagaactggtcctctctggcccttgctgcacagaggccacgctgcatttcctctgcccttgctgtggcatgtccacactgtccacctgggaagacttggggaaggggcgagaggaaacagaatgtggggatactggagagaaaaaaagaaacatagtggcaatagcaaagaaagtggagtcttacaggcaagcagatgccctgagcctggctacagtataaatcacagaaactagaggttaagcactgtttcttgagtaaagccgcaaggggtgctgttggggagaaggtggggccaccttgcctaggagatggccccccagcaggcagcccccaagccccagagccctctcaggccagaaatgtcacttcccaaacctttgggagcaccagtgtgtccagatttggccaagtatatttttactcttttttttttttcatgcaaactgcacctcatagagctctggaaggtctgttggcactcgaacacaaatttgaaaagacagtacattagtattacacaatgttggttgtttaccaacaaagataagtggatggagttacataatcctctgtacatgcgtgtgggattctcccagccctggacacttgaacttttaaggagcagaggctgtggagcactgttcctggcatggatttggccagcctggggcacttctccaaaccctctctcgctgtccaaggtgcagacaaagggtcctttagggccactcagtgcccgttggcaccaccagcctgagaaccaaatagccttcctgcaccgccccaagttcaaggaagtcacagacttgtgcctaaatgggagagtctcactgaggcaccaggaaagggtaggtcatgacaagatgacattagtagtgacaacagtcaccattgctaagcctggcagcttcaggcacgcttaaaactcccatgagaaggcagaggctctgaggcccaggaggctctgaggccaaggaggctggcacaaggtcacaaggctggaaggtgccagagctggagctagaccccaccccttctctccaaccctatcctagctgactccaggttccatgcttggaaccatggcacgctgacgacatcgtggcctttaaagacaattttctaatcacttctgtaggccttgaatgttccccagtggccatttaacaagcaattattgagcatcggctgtgtgaacctggtagacaacccactgtaaaatgagacggaataaatgaagtgctagttggggttcaggcaggttctttggatagacaggaaggcctgcatatttgggtgggaaggggacagtaggggagaatccagcaggacttcctgcaggaggtgctatctgatgcacaccgtgaagaactcataggatgtgagaggcagagggacactttatttccactggatgtggtggccagcatggcccctggggcttaacctgagtatggtcgtcccctggggacctgccttattctccttaggggaagaagacttgaagatctgcagtgtgccagacccctgctaggtccgggggtaagagagatcaaagccaccatcccccccgctccgcccctccagaaagcaggacagccttgcccagcagtggggaaagctctgcaggagccccgccccacctcagaggatgcggactggtccttggccctcctaagcctgagtgtcctctgcaaaatgaggacccgcattccaaccttgcaggtgcggggttaaatgagatgatacacactcacgccctacatcagggacgctgcacgcacctgggcacagaacactaagcactccgtaaactcgggggcaccggtaacatcagtgggctccagggagatgactgccccgggagagactcccccaggagcgcgggcagctggagggggcgggtcggcaggaaccaggcaagctccccggaggaggtgagtgctgagtgacagcaggagtttgccagggtggagggaaaggggcagagatccagactccaatctcagaagcttcactccccccggaggcggaggtgacgcgccacagaagcgcctgccactcggggactttatttcaggtggggctattgaaagttcccccctttcacacccggtatgaaaaccctcaaaaatccaaaggggcactttccctggataaaaataaaacttggaggggcccgcaggaatggaatactttttcttcctgtgtttaaatttctacggaaaatctgaccggcgcggccaccgcccctgccataggcgggcggagagcgcttatatctttaaggcaaaggcgggccggctggcgtccaagttcctgaccaggcgcgggccggcccgcgggaccagcagccgggtggcggcgcgatcggccccgagaggctcaggcgccccccgcatcgagcgcgcgggccgggcgggccagggcggcgggcggagcgggaggcggccacgtccccggcgggcctgggcgcggggaggcccggccccctgcgagcgcgccgcgaacgctgcggtctccgcccgcagaggccgccggggccgtggatggggagggcgcgccgcccggcggtcccagcgcacaggcggccacgatgagggtcaacgagaagtactcgacgctcccggccgaggaccgcagcgtccacatcatcaacatctgcgccatcgaggacatcggctacctgccgtccgagggcacggtgagtgcgggcggccgcgacccgggcgggagggccgcgcacctgcgccttggcgagggcgggaaccgggcggcggcagggcctcctgggaccccagggcgggggccgcaccctccgcgcagggttcgcggcgcccacccgcgcacgtgcgtgccgggaagggcgcgccggccctggccaagtgcgtgcgccccgcctgcgctctgagcgttccgagcgcggcgcccactccgcccagcgcagcgccgggcccccaggcatggcccggcctcggagctctgcggccccgaagccgcctcacccggggctgcagctcggagcccaaccaagagctcacggctggcgccctggatgggaccttcccttcctggctcgcggccaggggtacctgttggggcagccagggtgagggtgatggtgggggtcttgggtgaaggccaagttggtcgccactccacgatgatggtaactgccaggccccactgcttcactatcctctggggccagagtcccgagtcctcacttgccagaaacgcatattgtgcccagggcactgggcctggtaccctggcattggcaccgaaactctcaaagcccagggtgtcaatcattggagattgctttctaccctcgcccctgtctcccctgggcgcccaggcctggttcaggtgggggcactggttggaagccagtcatgtaagttggggaccccatcctgaggtccccaatatccccaccaccctccccagggccagacccagaggtctaggtaaccctatgttttagagaggggggcagaattctcccaggaagggtttggcttgaa

SEQ ID NO: 241 - DNA, 6000 bp, Homo sapiens
atctctagtggggctgggagctgtggctcacacctgtaatcccaatactttgggaggacaaggtgagaggattgcttgagtcaggagtacaaggccaacctgggcaacatagcaagactccacctctacaaaaaatacaaaaattagccaggtgtggtggcacatgcttgtagtcccagttacttgggaagctgaggtggaaagatcacctgagcctggggcagttgaggctgcagtgagccatgattgcaccactgtactccagcgtgggcaacagagtgagaccctctttcaaaaaaaaaaaaaaaaaaaggaaaaagaaaaaaagaatatcctggatagctttttttatcttttatttttaaaatttatttttattttagattcagggtgtacatgtgcttgtttgttacatgggtatatacatactggagggaattgggtttctagtgtacccaatacccaaatactcaaatagtgaacattgtacccaacaggtaatttttctttttttttttttgagacagagtttcactctttagcccaggctggagtaaagtggcatgatctgggctcactgtaacctccgcccctcgggttcaagtgattttcctgcctcagccttccaagtagctgggattacaggtggccgccaccacgcctggctaatttttgtatttttagtagagacgaggttttaccatgttggccaggctggtctcaaactcttgacatcaggtgatccacccgtcttggcctcccaaagtgctgggattacaggcgtgagccaccacgcccagccccgacaggtaatttttcaaccctcgtgctcctcttttggagtctccagtatctgtaatttccatctttatgatcttatgtacccattgtttagttcccacttataagtgagaacatgtgtctttggttttctgtttctgagttgtttttcttaggataatggccttcggctccacccatattgctgcaaaggacgtgattttgttcttttttatggctgcatggcaggcttttaaaaactatcaatgtctgagtcaataccaataaaagtatatctggtagtaggacctaaacattaccatttttttaaaagttccccaagagactctttttttttttttgagatggagttttgctcttgttgcccaggctgaagtgcaatgttgcagtctcggctcactgcaacctccacctcctgggttcaagtgattctcttgcctcagcttcctgagtagctgagattacaggcacccactgccacacccggctaattttttgtatttttagtaaagacagcgtttcaccatgttggccaggctggtcacgaactcctgaccttgtgcagaactgagaactgctggtatagaataaacctggaaagcaacacaggaaaatgggtgctgtgtttgcctctagaaaggtacaccagggtaagaataggctatgaggaagatttactttttactgtaaacccttgacctttttaatttgtttactttgtgttacctatttccaagaacaatcaagctaacattttacaaaatgttttgcaaaaaagtaaaatggcccaggcatggtgtctcatgcctgtaatcccaatactttgggaggccaaggtaggaggatcacttcaggccaggagtttgaggccaggagtttgagatcaggctgggcaacatagggagacccccatttctacaaaaaaataaaaaattagctgggtgtggtggcgttcggctgtggttctagacactcaggaggctaaggtgggaggatcacttgagtccagcagttcgaggttagagggatctataattgcgccactgcactccagcctgggtgacagagcaagaccctgtctcttaaaaaaaaaaaaaaaaaaaaaaaaaaagacacttatagcagtgaaaatgaagcctgaatagcacactaggaatagttcattcaatagtgggaatccagtgggagttcaaggtccagtggggcctcagaggaagtgactagtcccacctgggaagaatgggtggtcaggaatgctgaggaggtaaatcctgaagtggccccaacctgaaaggacttatttgctggcccaccatgcctccagtgcatacatcattagttacgctttggaaaagctgtttgggaagagtaatggctataaaatgtggccctccggctgccagtcacctctgtgaaccctgagaccaacaggagggaaaaaatgcccaggctaggaggcgtaaagagatccaagtgctgctgatgtgatgtcatcgaggaaaagctaattattggccagctttccagtagcagggatttagttattcacccccaccccccaccccacccctccacccgctgcctttgattcctgttgtggagcactggaacatcggtgaagggaaagtagcatggcagaccaaagtctggctccatggagctccttgggatgtgtgtgtggagatcagcgagggaccacaacagtaaacagcagccagggatgctgaactaggaggcagagaggcaccaatggccaacctaaagcttctttactagcaccttctcctggccccgggccatagcttgcatgttcttgggtgctggcatgtcacagctcccaggtcaaaatccacctccatcccatctcaaaatctactgcttgttagctgaataaacttggtaagtaatactattctgagccccaatttcttcgtctgtgatgcagatgaatatgtatgaaataaaatcaaagaatgataggcagtattaaatttgactggtctggttttttatttttgcttttgtttttatttttgagatggggtctcactctgtcacccaggccggagtgcagtggcacgatctcggctcactgcaacctctgtctactgggctcaagctgtcctcccaccccagcctcctgagtagctgggactacaggcacatgctaccatgcctggctacttttttctatttttggtagagttggagtttcaccatgttgtccaggctggtctctaactcctgagctcaagtggcttataggcatgaaccaccatgcccggccaaatttggccaatctttattggtgcctgttatatgcaaggtcctggcttccccacacagacaagaaaacaaacaaataaatgaataaatgtcagctgcaaggattggagtggattcttgcatttgcatagcacagtgagtgtagtggttaagagtgggctttgcagtcagacgtgactgtgttaaaatcatgctactgtcacttattaactgtgggacgttgggcagatcacctaacatctctgagcctcatttcctcaccaaaaaaaagaagaatcataatatggcacctcctctaaagctgttgtgaggattaactcatgtaatgaatgtgaagagttctgcgcaggcacgtgataaacatccagaaactgtttattctgcttgttgtgcagtctttagggcttaaacaaagtactttacactgattgccttacctgaccctctccaggactctgggtgctagggcattaactaccctttgaaaggtgaaaacattgatgcccattgaggtgaaatgatttgtcttcagccacaaggggcagcatcaggagtagaacccaagtgtttgtgttctgattcccaagacagcttatgacgttttggaaactctgaatctgatgggtgacagaaacttggggatcatctctagataagaaagggagttccttgaatgactgtgaagacgttcaccggaaagggaaggaaaggaagttaatcatgcttccttcacaggccctccttcacccccatctagtgggcacatgcaagctacaaacaaggtgaggaatgaacaaattaatacatactcaatagtggccagttcgaggcagataattaaatcaagatgacctgaaaggatgtgactggctgtggctagtttacacagggtggtcagggacggcctcgccatggagagggctggtgttttggctgagacctgagagaccagaagaaatctgatggccagaaccaatgtttaggtccctaaagagaacaagcgtggcgagcaaagggggccagtatgggtggagatcagcgagggaggggggcagagatgagtgcccgaagcacacagtaccttggcatagggagggtttgattttacctacaaatgccattaaacccactaaggattttaacaaaaactacaattacattttaatttacattttatgttttatagagacaaggttcggctatactgcccaggttgatctcgaacccctgggttcaagcgatcctccctactcggtcccccaaagtgctgggattacaagcgtgagccgctgcgcccggccttttaatttacattttagccttccggttactggaatctttgatggggaatgagttatagtgaggcaagagcctctaacattctaggagctcttttcccgttcggggcctcaatttcccgttctacaaaggcgggtgggagggaacggggtcccaagtagtactggataaagaggtggccgatcgcaaacgctgagcacttcaaaactctgggcagagcgcttccgcgcctctcctgctatttcaccctggccacaggctagccgccgaggccggtcatccgctctctccgcggaggagtcaacgccacggaagcagcggcggaacctctctaagaatccttccagcttgtgctcttctgtccagggcagccaatcgcgaggaggagagtagtcagagggcggcaccctccccggtctgggccgagttattggctggtggtagcgtcgctcgcccggcagtaccacgtgacggcctcggccgcgggcgtttacactggctctgcctccggcatctcttcgccggtgcgtcctcgccgcgcccgtaggtcccggcagccgggccccgcctccttcggagtccgagcgatgggcggggaaagggacaggcaggtatagctctgtcggcgccgcggtgtccacctcagtcaggccacggtggaagacgcgtgccgcggcgcctggttgcctgcagcggcccggacccgagaggtgagaagagggaagcggaccagggaagagggagggagcggtgctggccgccaagcggtcagcgggcccctcccagagtcattctgcctgggtccccgcgcggtagaatcccagatcaggggtcgccgccgtggagcggggcgtgcgtcaggttatttcccgggtggtccggggccgggcgagtggcactgcaccctggtgatccgggcctgcccgtctggctggcggctgcccacccgccctccatcccgcgtatctcgccgtatctcgccgggtgccacgcactccgctgcttttccagtcctcgttgatccgtctcgaacctagatatctggaatagggatcgaggagataggagccaccaccacctcggacagatggggaaactgaggccggcacaggcgagacggcttggttatcttggttattaaaaatcacacacccgattaagtacaaaatcaggacctgttctttcggactcacacactaagttggtattatttcactggatggatggaaacactgagaagacagagagggcccagagccttgcctaaaaatacacagcaagtcttttgcagagctaggacttgtacccagctctccaaactcatagactatcagcctgggctccttccttgcacagattggggatcacagtgagttagaaacattcagaacttaaattgccttccggcgcccattctagttaacctgtcttttctccttgtccccaacagttctttatgtgaaatctacaactaatgtgatatgcaatactagattaagcagaactttttgtttttgaaaattgaatcaataagaaatggagggccaaagctgtgggaaaggaatggaccctttaaaatcaggaatctcaaggcaggatatagcaagggacaga

SEQ ID NO: 242 - DNA, 6000 bp, Homo sapiens
cctggtggagctgctcatcgccaggtagggcctgttgggcgtccttggcagggagaggcttcctctcagatggccgctcaggaggctcctcttgggcagtatctgtggctctcggcctcctgtgttcccgccttcacctttgctgaccctgcctgtgtcctggcatggagagcagggcctggggctccaggggaatgggcatgtgcccagggcagcgcggtccctgcctccccagcattcgtcctcctgccgagagggcaggcctcgggcccccccccagagtgtgcacagagaaatgtcttggtcagtgaggagggcagaactgctaaggagggaagcagagtgaggaggccaggtggcttgggaggagagggtacctgagcacaggtagggcctttacctttaacacagagggacgtagagcggggggaactctgagcagggagggtccatgagcctcctcccttcccctttgctccaggcatctgtagtgggagagaggtcagggctgcggtcattctcgagtgcccctgtgaggccgggtggggtgtgcatggcggtcgcgtcacacacaggcgctgcggggcaggcggggatgtggggtgtccacaggtaggcctgctcctccactgcacacagacacccccttctgtgttctgggctccccttcaccgcccttcttccctggggccatgctccccacagctcagcagcccctcagcgtggctgcctggtcctgcacccccgccaccctgtgctccctgctccccagcaggcaggcccatccaatgcatgtttatgggggcaccgctgcccctggaggtgccaggaacctggatccctggatggatagagactgcaggaggcctgtctggcttaatgacaggatctaggacagccgatgggccccaaggctgcctctcccagcagcaggtggacagggtgcctcctgaggggcagccctgggctgaggggccctggcggggacttctccaagtgaggagcctggcaagcggggaagggccttgtgcccagcaccccgtccgtcttccctgcagtggcgccaatctcctggcggtcaacaccgacgggaacatgccctatgacctgtgtgatgatgagcagacgctggactgcctggagactgccatggccgaccgtggtaggtgcggcggtgcggctgtgggagggctgccggtcgcgctccctctgagcctgccgcctcgcaggcatcacccaggacagcatcgaggccgcccgggccgtgccagaactgcgcatgctggacgacatccggagccggctgcaggccggggcagacctccatgcccccctggaccacggggccacgctggtgagggctggggggtgaggggcacacggggctgggggcctcgctacttggaggtgggggatggggccgaattcaggccgggcgcttgcctgcagctgcacgtcgcagccgccaacgggttcagcgaggcggctgccctgctgctggaacaccgagccagcctgagcgctaaggaccaagacggctgggagccgctgcacgccgcggcctactggggccaggtgagtgcgggcgggagcaggtgggagggggcttccagcgcagcagtctgcagctccggcctgccgtccacaggtgcccctggtggagctgctcgtggcgcacggggccgacctgaacgcaaagtccctgatggacgagacgccccttggtgagcttgcggggcccacctccacctgggggagaggacaggcggggagggcgcccctgacgcctgcgcccacttctcagatgtgtgcggggacgaggaggtgcgggccaagctgctggagctgaagcacaagcacgacgccctcctgcgcgcccagagccgccagcgctccttgctgcgccgccgcacctccagcgccggcagccgcgggtgagcgccgcccccagcaggccccgccccgggcttggccccgcggacgtcagccccgggcggagtgccagccgaactgggggcagagtccgagggggtgggcggggtcctccgggcactccccttcccctcactccctctcctctctcctccccaggaaggtggtgaggcgggtgagcctaacccagcgcaccgacctgtaccgcaagcagcacgcccaggaggccatcgtgtggcaacagccgccgcccaccagcccggagccgcccgaggacaacgatgaccgccagacaggcgcagagctcaggccgccgcccccggaggtgagcgccccgtccctgctccgcccagcgcaggggtgggcctggctctgccctggttctctctccgcttggaccccctcctgcctgtgtcaggaatggtgccctgcaggggccagcttttgccccatctctcctgtctgtcccttcatgaccatacagcctgaacccaaggccagggaggggggaggagcctcctgatggctctgggaccttcactgcccgcaggaggacaaccccgaagtggtcaggccgcacaatggccgagtagggggctccccagtgcggcatctatactccaagcgactagaccggagtgtctcctaccagctgagccccctggacagcaccaccccccacaccctggtccacgacaaggcccaccacaccctggctgacctgaagcgccagcgagctgctgccaagctgcagcgacccccacctgaggggcccgagagccctgagacagctgagcctggcctgcctggtgacacggtgaccccccagcctgactgtggcttcagggcaggcggggacccacccctgctcaagctcacagccccggcggtggaggctcccgtggagaggaggccgtgctgcctgctcatgtgaggctgttgctcagcatgcaggggccctgtcgcgggcacagcccaaggctgcctccccacggtgcgtgccctggtgctgcgggtgcagcacggaaaccccggcttctactgtacaggacactggcccctctcaggtcagaagacatgcctggagggatgtctggctgcaaagactatttttatcctgcaactcttgataaagggctgttttgccatggagcctcgttgtgtgttgtgtgtctcagctgggtcgctgtcccacagtggggagtgggttgtgctgtttggctggggtgccacccgtgcctgtgagcatgaaagcctgtaggtgcgcgctggggcatgtggcagccctggctgtgtgggagtgaggctcacagccactgggctggaagcctgggcctcacccactccctcccatgctcagcctcctggagcctcctccgtaaccctttgctctcctgagaggagccaggtgctttgaaggagcctccatgggggccagggcctagggtgtctgtgctgaggggcggaaggtgggggtcccagggaccatggcttggaaagggaggtggtgttttccacaagactcttgtgtcagagccagaggggcaaaacaagcacaaggctgtgtcagaagctccctgggggggttgtgggtccccagttcctggcacgcagccttaatcctggggcctggctgccagcttccgcctgggctggcataggggacacgcagttggccactctggctctgagctggcttggcacaatgtgtcagggtgagggggccccttaggggcctcaagcaggagggctgagggcaccgctggttcgtctgttcatggtgggcggctttgtgtggccaccagtgctgggtggtgtgggtttgggctgttctccctcctggctcagcacgggcccgtcagcccagtgtcctttgggcctgcccttcccctagcatccctggttggaagggtgtcctcacagggctgtgggcgggccagggctggctgctggttaaatttagtgtggggggtggggcagctgcccaaggtccacctgccaccagggctgccacttggactcccttgccagggggcgggcaggggctggctctgcctggggccaggcccatgttaacctgtgccccggcctgggggccagaggggcaggcctgcgcacggggaggctgttgtggcagcggaacagagacgtgcacggtgagaggcctgggggccggctgtccagggctcccgatggcttttctcccagccagcaggatcagaggagccaaggtccgacttgggcctggctggttgcccacagccctgctcagagggccggctccctgacccccatggttcaggtttcggtgcccgacgctggggtgggccagcgtggagcctggcctttcagctcagcaggcctgtggaggtggggctctgacggcctatcccagctcgtttcctactctctcctccaatcgggaacaagagggctggagagctcaggtcacccctagcctcgggtgtgtcccaagggcaacccccagctggtgcctggtgaaagggcatgacagcagccacggtgtgagctgtcccagggctcagggctggactgcctggctccagccccctcccccagcccctcgcagtgctcatcagggaccaaggtccagctacagagctcttgcagcctctgggccatagctgccagctctggagggtccagatggaacccagagcctgaacacccctcccctccccccagcaccccctggattcctgaggcctggctcagttaataggagacaggtccgctggcccaagcaaagatgcgggtgccacgagggccaggcctcggccaagccctgctggggtaaatcccagcagcccaggctccagtctcgcctcgggggtccctccttgccagctctgccagcccctcagggctgctgggcaccccttcacctcctgagcaccccaggtgctcagccctctccccctccccccatgtctagtccctcagagctgtccggactgacgtctgtacctaccccccatgtgggtctcctgctctcccttcgtggggacactaggcaggcactgggccttgccccaagccccgcctgccacctcacccactgcctctgcctccctggggcagagctgttcccagacgggtggggcggggcccaactgtccccagctccttcagccctttctgtccctcccagtgaggccagctgcggtgaagagggtgctctcttgcctggagttccctctgctacggctgccccctcccagccctggcccactaagccagacccagctgtcgccattcccacttctggtcctgccacctcctgagctgccttcccgcctggtctgggtagagtcatggcctcgagcacaggtgaccggagccaggcggtgaggcatggactgagggcgaaggtgctgacgctggacggcatgaacccgcgtgtgcggagagtggagtacgcagtgcgtggccccatagtgcagcgagccttggagctggagcaggagctgcgccaggtatggcccagggcccctcgctgccctccaggtcacaatggggtggccgagttggccccagccccactggcacatgggacaagggctgaggggttaggtagggcacagtctccctgcctgctcccctcccctcccagggtgtgaagaagcctttcaccgaggtcatccgtgccaacatcggggacgcacaggctatggggcagaggcccatcaccttcctgcgccaggtgaggctcctgcactgcccggagcacccccccacccccagcccatgtgccctggcctcagcactccgtcttcccaggtcttggccctctgtgttaaccctgatcttctgagcagccccaacttccctgacgatgccaagaaaagggcggagcgcatcttgcaggcgtgtgggggccacagtctgggtgagagccagggccaggaggaagcagagggccgccctgccactggaggagggaagtcccttgggagggctgaggagaacttcacctgtacttcccatcctgtcctgcccgagtccaggggcctacagcgtcagctccggcatccagctgatccggga

SEQ ID NO: 243 - DNA, 6000 bp, Homo sapiens
ctaatttttataatttttttttttttttgagacggagtctcactcttttgcccaggccggagtgcagtggcgcgatcttggctcactgcaagctccacctcctgggtttacgccattctcctgcctcagcctcccgagtagctggaactacaggcgccagccaccgtgcccggctaattttttgtatttttagtagagatggggtttcaccgtgttagccaggatggtctcgatctcctgacctcgtgatccgcccgccttggcctcccaaagtgctgggattataggtgcgcaccaccgcgcccagccttaatttttataatttttttgtagggatgaggtcttgctatgttgcccaggctggtcttgaactcctggtctcaagcaatcctcctgccttggcttcccacagcactgggattacaggcataagctaccatatcaatccccagcttttaacttaaaagtactataaaaccatattcaatctactcttcatcaactttttcttttttttgagacagagatctcactttgttgcccaggctggagtgcactggctgttcacaaatgggataatagtgcactgcaacctggaactcctgggctgaagtgatcctcaggccttggcttctcaaggtgggacttcaggtacatgccacagtgtccagctttcagtcaattattaatgttctacctgaatagtgtccctactaaagtttttgaaagtatttttccatgaataaggggactgaaaatatgaatcaaatataaagcaatttaaacttggacaagtcacttagattctctgtgcctaaaatttgtttgtaaaacagtggagcctggattatttgacctctcagatctcttctaccaactccacagaatttattaaccttataaacttgaggcagaatcacagtgtagtatactatgttttcatgttttgctttattttaatgagaatcataagcgaaagagggctggatgtgatatattggaagagtagcacaaggcagcaactatgacctaggttctcatactttatcatttcacctttatttgtatattatctgtaaaactggtaaataaaaatctgccatagttcctatggttgtggagattaaatgaaagaaaatttgatgtaaatggtgaatcactatatgaatgggatcaatttttttttttttttttttttttttgtggagacaaagtctcactctgttgcccagtctggagtgcaatggtgtgatcttggctcactgcaacctctgcctcctgggttcaagcaattctcctgccttagcctcccaaatcgctgggcttaaaggcgtgcgccaccacgctcagctaaatttatttatttttttttgtgagaaggagttttgctcttgttgcccaggctggagggcaatggtgcaatctcagctcaccgcaacctccgccttctgggttcaagccattctcctgcctcagactcccgagtagctgtgattacaggcatgcaccaccatgcctggctaattgtgtatttttagtagagatggggtttctccatgttagtcaggttggtctcgaactcccaacctcaggtgatccgcccgcctcggcctcccaaagtgctggaattacaagcgtgagccaccgtgcctagcctaatttttgtatttttagtagagatggggtttcaccatgatggccaggctggttttggactcctgacctcaagtgatccacctgcctcggcttcccaaagtgttgggattacaggtgtgagccactgcgcctggccaaatggaatcaatttttatcactattttattttattttttgagatggagttttgctctgtcacctaagctggagtgcagtggcgcagtcgcagctcattgtaacctctgcgtcccaggttcaagtgattcccctgcctcagcttccagagtagctgggactacaggtgcctgccaacacacctggctaatttttgtgtttttagtagaaatggggtttcaccatgttggccaggctgttcccaaactcctgacctctgatgatccgcctacctcagctttccaaagtgctgggactacagtcgtgagccaccatgcctcaccaaattttattattttcttttttgcaggtttacctcaatgtatgatcttccagaaacagttctgaaacctacaggttaatgaccttgtattagcataatatggtttgctaatattcacttaatactcataagtttgtagttggcaaagctggaaatagaactcaggttcactgagtgtcatcaatgttattctcatcagatcttgctgtttattctttttgaaactgcttattaatttgctttaaatattaacaacacagatactggataatagtaaatcataagaattttaaaattttgatggtatctcaactgatcagcttttcttaaattttctaggtttcctcagcacaggggaaagctttataggtggaaggtggaggccctgtgacttgcgcagaaaagtaccactgtaatttacttttatgggcacctaagcaggttgcccagggcaacttgtagattttgttgttgttgttgttaatactatctccttcagtcactgagaactcttttttatttttttattttttgagatggagttttgctcttgttgcctaggctggagtgcagtggcgtgatcttggctcactgcaacctccgcctcccggattcaagcgattctcttgcctcagccacccgagtagctgggattataggcatgcgtcaccacgcccggctaattttgtgtttttagtagagatagtgtttctccatgttggtcaggctggtctcgaactcttgaactcaggcgattcgcctgcctcggcctcccagagtactgggccttaaatgctggaattataggcatgagccaccgcgcccagctgagaactcttcttgttatcaaatgaccctctttactactggttctagaatttcgttcagctttggctcaaaacataatgcagaaaacgaaatctagtaaaaacagaagacaaattagctgataaactttgttggcataattagtaccataaaatctggaaaagctaaatcttaaattaaaaattttttagatttccaggataattcacaaatgtttatagattcagaaacaaaaggtccattgctttatactttacatcatagacaaccactgcagttttctaatatgggtttcaccttcttcaaacctgatattcttaaaatgtggagttcaaactgactatagttaagaacgaaacaaatagccaatacaaagaataataaaaggatgagttcaaattatctgccacatgtcatcaacttttattaaatgataaaaaggttaattaaaattgtaaatgatttttcagaagaaattacatcttaaaattggcctgtgaaagtggcttgaaaggtataaaaatctaccagtagctggtattagctttcttagtaatttaattttcagttagagaaagccagaccactttgacctttcgaagtcctttggtatagatacatatacatttaaaaagataaatgaaaacaagccattgattaataatgcccatcgcagaagctgtaattataaaattaagattttttgatgtcactgttgatgttgaatatagttaatagaaaagcaaaaataaaaaataaaaaaggtctaattttgaggcactcttttgtctctgctcaggtccaccgtcttccttgctaatgtttacgtttattattaatttttccatttatttatttacttttaccacaattaggggacagagaatgaaacctaaactttttattgcttctgtaaagagtgaatataaatgtaagattttttttttttgagacggagttttgctcttgttgcccaggctgcagttcagtggcgcaatctcggctcactgcaacctctgcctcccaggttcaagcaattctgctgtctcagcctcccaagtagctgggattacaggcccgcgccacctctcctggctaattttttgtatttagtagagacggagtttcaccatgtaggtcaggctggtctcgaactcctgacctcaggtgatccacccgcttcggcctcccaaattgctgggattacaggcgttgagccccggcgcccggccaccaaatcctttttcaaaacaactcccttctttgacacagtgcaatttaaataagtatacaattaacaaagtacgtttttcttgttcaaaaccatcactgaacagtttgcaacagtagggtatgaatgcatacaatctcgatggtctttacaccttcagaggctattcggacttaaggaaacgtgcatttacaagtgtaaatgtaaaagctcagtagttgccttgtaaagtgcttttcggggttgtggggttgggggtggtaggagtaggtggtgcctcaaattatactagcgaataccaacattcccaaacatctagccctctgcctaaactcacccggttgcggtctgtcattttcgctcttctttgttaattttttcggcaaagtcagttttcatgcagcagatggcaagaaagccggtgaacgcctagggacgtggccttttaaccgcacccaattaaagcagcaaacagaagatgaatagctgggtggatcagtatgtgtaaacctatccgtttaatccggggagctgttttcccgggtgaaaccacgaattctttctggaggttgcaactcgtaaccatagcaactggaagtggtcgccggctcccggatgttgtggggatctgcggccgcctggcccagcttcccgcagccgcccggcggcggcctgcgctccacttcgggagtggtagttcttctcttcaccgctgccgggcaggaggcgcaggcgggactacgcgtcacggcatgcactgcggcgcccagccggtcaccgcctgccggctgcagacgcctgcgagcaggttgtttttataagaggcgtcattggcgcccgagctgtgaccgccgccactggggcagccagcacaatcgggcggaggtggcgctgccccttcaggtactgtactaggcgggcttagaccccgggagggggtttgtgccgactgtctgagtccctggccgacacgctcggctcagtagaggagcagtggcggggtccgcctcctaggctggggctgctcgggcggggacttgacgcctggtgtcagcggccgcacgggcgacctcctcgggccgtgcgcgagtgcacagctccggaggcccgagccgaccctggggcgtccggtccggtggtcttgcagcctccaaaccccgagtgctataccgaactgcgcgccaagggtgggagagctgacggcctgggccacccttcttccttcactgggcaggctttgaggtgcttgtcggtctggactgatgaaaatccatatggtaagatgttatgtgcgtcaccctgccgggtttaatgccagcctgtcttttgatgacatttgagcccccgtgatgtcaggaatagaaagattaaatattaaataatgcccggagacttccgctagcacgccagcctgatgatgatcaaatacctctccatatccttctccagttccagtggcctcctttagctttggtctccctaatcgatttgtcctcattagcagctgtcccatgcagtgccttgtacgcgttgtttatgtttagcactattgggagcgccaagtaaggtattttattgagtggtgaagtttgcactgttctgctctacttttattgaaaaacacagttgggcattcttgtagttagaatagctaactatatagtactatgaattttagatttgtctcctccaatctacaggatagtgcttgaaatatcgctattactgcatcgtatcttttaagattagaatcatattgggtcccacacgtctcaggggatatttatcacacacatccagtgtgaatggtttacttttattttctgag

SEQ ID NO: 244 - DNA, 6000 bp, Homo sapiens
caggataaataggtttctggctcaggatctgggtggatgtggaaactgttccctgaattggggagctgagcagagaggcaggctggggtggagaactagaagtggataagcccaggtctgagcaggctgtggtggaaggggtggggtggggctcctatgagacatctgaggagagagaatgccagatacaatacagaccctgggacttgggagaaaagaggtttccatcctagagttgcccatccaccagcagggacaaataagaaagccagcaattatggagagactgttgagtcagaagagaggtctatttccaccccacacccttccttggtaccctgtgagtgctgcagatttacacactgtgtcctccctccctgagctggcccactctgtgctttcttcctagaaagtgctggttctcacctgccctttcccataggctgagctaggagcccttcttatttccatcacatgctatatctcttctggagtaatcaatcatgctttgctgtttaacgctgttctcaataaactctcaaccccctgaggacaggggccatgggaatgtcttattcttctttatatttgtttcctcaacacctagcacagactctgacatgcagctcagtgtggcatgaacaaatgaatgaaagagtaagtgaagagtaagtgaatgactacacaagatactatgcaaaaaatgagcaagcctgcataaaagtattgctagctgctgtaacaaactccaatatttcaatggcttaacaccctgttttgtcactggcatgaactctttttccttatacacaaatgaagaattttcaccaagaatgtcagaatttggtgaccacagcatgtggtagcactagaggaatggcctaggctgtgggccccttctcacttctccctcctggtttcagaagcccacagcctcaccttggtgtggtctgggctttttcctcatgaagcccctctgtcgccactccttgggcagcagatcactgccacctctatggtgatagcctcgcccttgggagatactcgctttggcctgatcatgctcatgattttaaaattgtgccccatttgggatcctaagcttttcctctgagcccatctttgtcctgtagcccttctctgcagccctgcctgccccttggcctctatttctgccctcgcattgctagaatctcccatttgctcactctctctctctctctctctctctctctctctctctctcagcttcagaaggctttttgatcttttcctgggtcagaatgaaaatttcagggcatcaagtctacagctcctccttgaatgaggcagagttctccagagcatcaggccttgtattctttctaaatcaaactctgattttatctggatattaggcttatcttggctagtcactagactgcattgggcttttttgcaatgtgatattgtaaagacacctcaacccacgactgcctgttgctcacagggagaatgagaggggcaggcagggagccagcacttggggctgggctgagacccacactctcctaggctagatgcgggtaggctgttatgtctttgactcctgcctctccattgccctgcagatgtttccagggtccccatctctgcctttgcccccatgtttcctggctcagactattgcagtagtcttctaagtggtaccctttcctttcttaccctttcctcacagagaagttagagtatatgtcaggccacatcacttggcgtctctttcccagaaatgaaaacctacctttcatattcagagctgtctacttttcactaaaggagccatgctatacacagaaaataaatgtaaacagatatctctttacatatattttctgactgtcaagcatctctctcctccctccatctgaaaagtcatctcctcctgttatagaatgaattgtgtgcccccccacccaaattcataggttgaagtccgaacccctagtacttcaggatgtgaccttatttggaggtagagtctttaaaaagtcagttaagtcaaaatgaggtcattgggttgggccttaatccagtatgactggtgtcctgattagaagtttggacacagatatgtaccatgggaacacatgtgaggacacagggagaagaaggcagccatctacaagccagagagagaagcctcagagggaaccaactgtgtcgacctcttgatcttggacttccagcctccagaattgtgaggcaatacatttctgttttttaagccacagggtctatggtactttgttgtggcagcagtcctagcaaattaatacaccttctatttctcactggctaagaataaaatgcaaactcctcgccatcccctaatagaccctatgtgatctgccccactccctatctcccattgcttacctggatccagccccatcctcctcctcctggccccctttcctttttacagccttgcctgtgctcactataccaaaagctctttccccaactttgcatggctgccttgcttaattctattattatattaattaattaattaattaattcatagacagatagtctggctctgtcacccaggctggagtgcagtggtgtgatcatggctcactgcagccttgaacagctgggctcaaatgatcctctggctttagcctcctgagcatcttgcttaattttagatcccatcttccaccgttgccatctcagagaggccttctcagaccatctccttaaagcacatccccatattgtttctcctagcaccataaactttccttttgtagcatccttaattagtaactttatgtgtatttgtatacatattttctgccttcatcaagtcagggactgtgcactaggtgtatattcattgtctagcacagcacccaggcacataatgatgctcaataaatatttgttgagtaaatgaatcttcatcttttcaaggtctttatccatgtctcaggttccagaccaaatcctactttccttcttaaattagccttctgatcccccaagtccaggaaaagctcactgtcttgacatgcctctcggtagcatgccggttcttcagtcatggtgattatcgctgtctgacggtatcagttacgtgtgggtttccacctctggcctgcatcctcccaaagcaggaccacacactgtgcatctctgcagggcccagagcacagcctcgctcagggcccccgagcacaggaggcgctcagtgaaagcacgtggacccaaatagatcagagagcaggaatggcggaggatgtgagtaactgggccttttgcagggataaaataggtgccctgccctccacagcccccagggagaaggatgacaaacgctccttttgcccgggaaagttctgggggtaaatctcatctgcccgttgcagccacagagcaaagttctggagctgagaagagggtaagagaaagcccattggcctgcagccccagaattacagagcagcccagactctcttctgcccagctgtgggctgcacaggaggcctgggcatctctgccagttcctttctctggaggagaaccccgcctccaagagaggggtaaagtcggagcttagaagccaggagcccacccccaggcaagcccagctaacagcccccaaggccaccaccaccactcactgctggcgtagtcagtcccttcctcctctccagggctggtgggaaggctgagccctctctttcgggggctgagtctggacaatgggaagggagaagccccctcctcactgccccgggaacataaagcaggcctttcactgaggagttctggctgcttcggttggttcttggcacccagcaaggcggcgtcgggaggggcgggcatacaagcgtgttgggggtggggaccaggcccgcgattctgaggagattcgcccgcccagggccaccgggctggctccccagctgtgggatgagctcatgcagggaaaccggaacaacttggggtggggggagggaggaagagtggcatctaggaggctgcgaaagcgtggctctggggaggaagtttttcatggggagtagggacaagcctccactcctccagccctgcccccgccccccaattcatatcgtcaactccacagcccctcttcacacccttccttggatggaaattcctggccacgctgacagccggccaacctgggtcgccagccacccccagcctggctcgccatccctacagtccctctccacacccttccccggaaattctcaggccccaccgcccgccggccactgcccccttggccacacagatgccaacgctccgttttggccaaatcaggctgccctaagcccggagcacagcttctctggggtgtgtcggcaaagggggcgggggtgcccatcgcaggtgcctttccactgcacgcgccagcagaagcctcctctctggaccttgcccctcccagtttcctccagcctccccccatgaagcgtctcttccctctcgccgagagtttggcgtagacagcgaaggagccatcgtgactggcggagaagcctggagtagacgagacagagacggcgaccgagtcgggtgggggatggggtggggaccgacactaagcccttggggcctagaggcagccgctactggggagaggtggggagcagctcacgtccttgggaagaactctcttggtttggggccttggctgggaggaggaaggggagaagaagaagtaggatccgattatttaaatttggggataaattgtactagtaactcttgcaccgtccttccaccaacctcactccccacccccaactcgcgtgcacacagggaccgcctctgccaccctgagatttttgtcttagggtaggagtgggaccgcactgggtcaaatgaaccggttcccccccctccccaccccacacacaacccccctccaccgccctccaattcttaaccctgcctctgtctacgcacacacgcccctctcctgggatggggtaggaggctattgtgaatgaggctcataagcatcgcccccggccctagatggcaagttcaaagccaccacccaagatcagctggtaagagccaagacttggggaacgcgtccttctttggttaccttttcccagacaggattccaatttccaaacgtggaagaggtgtgcgtgtatgtgcctgtgtgtgtgagtgcgtgtgtctctgtcactgtgtgtgtgtgtgtgtgtttgtgtgtgtgtgtgtggagaggggggtgtattaatgggtgatgttataaatgaaaacaggaggactgaacttaaaagaaactggtcaattgcaaaacagacacggataaacaaccctttagatgtaatttgtggtttatctggaggtggaggtggcgctgaagaggaacccccgccccccaatattttatccttagctgcgcctccacccccagcatttggagcggcggagaagcggctccggagtgattaatccggggataattcaccccctcccgccccccggcgcgaaccccgcgaagcgggattggagcgagtcatttccgagagcgcagcgcgcctctccccggccgggcggacacttggttcattccagccgcagaagctcagggctcccgcgtaccgggattttttccgagcagaaaaaagctccagagctctcctgacctcctttctcctcggcggcgagcggagcctctccctcggcgctgccggccgcgccatgccgcgctcgcggggacgggagctggggcgctgcggctgccccgcggggagggctcgcggcgaaaccgggatttcggcgcttgtgccgggcgccgggagccgctggggccgcccgccgccgccaacgccgccgcctctgctgctgttgctgggctgtgggttgctcagcgtctcggccgccgcgggtgagtccagccgcgccgaggagccagcggccgccgcgcgccccacccgagccccgagcccacccatc

SEQ ID NO: 245 - DNA, 6000 bp, Homo sapiens
tttttttttacctcctccccttccgtttctgagggtaaagcagcacttatttatctcccaaggctcagcttccaagtcacttcctttatgaagcccctattgacacatctgccaccaggtaaacttgatcactccccttttttgtggctttactgtgccttgaaagcttccaccttagtaaccacaacttttatttgcactaatatatttatccaggctaatcaggttactgtatggctgatggcacagggaaacgaattcctaagtgcctaccatgtgctacatgggggcacacaaagcagcatcgttgttcacacctggaatgttatttgctcacatgctgcccacccaaactgtacccatttcctttagtttgcctcaaatgccatcttttccaagaaacttttctgaatcattcccattagtatgaaaatcccatcttccttaaatgtagtggtacctgcatttctatttaacatatttcttgtattatcattatttacttgtattatagttataattatttacttgtattatagttttaataattataattatttactcctctcctcccccagagaactgtgaatttctcgagagcagaagcagtattttattccttttttttttggttctcccacagtgcctagtgccttgctctttgggagctcattgtttagaggagaaggtcataaaatacatatttaaaatacaatcttaacttcagggttagagatctatacagggcattgtgaaagcactaagaagaggtaactttaacctctgtggcttaaacacataaggggttttgtttggcagaaggtgccctagagcttttggtgacttgggagtcaccaatgtaattatcttaaatattcctatttcagcataagtcattttggtgctgaattcatgtagggcctcaggcataattcgcatggtctgagagaggggaagagagctgcggtccatgttccttagagaagatggggattttctatggataagggctttctcattctgccatgaagtggtaagggccctagctggggttagggcgtccaagaaattggtgaggtgaagataagagcactgtactagactgtttggtttctttgcaggccagagatactttttttttttctttgaagaaaaagataaaggcaaaaacagcatttgagcaaataaaaattatccttgaactcacctttacttgatgggctactatgtctgtttttgataacgcctaaatctttcttctaggaaatggcacgtgccacctctactcatatttaattcgtcaaagaagtcacatggtcaagcagtgaaggggcagcaaatgatagagacaatgatgtcatctccaatgactacatggagccctagtcgtttgtttctgaagataaaagaccaagaagaggtcaaaaaaaaggaggctcgtaaatgtaactttaagcaggtgaaataaaagattaatcagttgaaaaaagtaatttaaaaggaagaagtaaatttttttatcaacaaagtttgaaaccttcagaaatcaaaatatatataatgaagaaaattttgctgtctttcctgacaaaagaaaaactagacataaggaattaaacaaccataggaaaaagtgccttacctgagacataagcctagagaagtgcttatttttagtgtatctgaattggttttggcagtcacagatggcatttaagggagcaaatagatccgcaatgagcacttgcatgattcggcatctttgttcacacctggaatgttatttgctcacatgctgcccacccaaactctgcccatttcctctagtttgccccaaatgccatcttgttcaacttttctaaatcattcccattagtatgaaaattccatcttccttagatgtagtggtacctgcatttctatttaacatattaatattgcgtattgccttgtattataattatttacccctctcctccctccagagaaccatgagttccttgagagcagaagaagtattttattttttatttttggttctcccacagtgcctagtccagagcagcgcacatgaaggaacccaattcattgctgttgaagtttatgaattacagtttgtataggagccacgtgacatgcatatgttagctgtacccttgaggtgatcccagagcataagatgcacataagaggaggtcaaatttatgactctagggcctagactcaccgatacaataagaaagctttggtacggtagacaagcagtgaggaaagacaggagcgggctgtctaggttgtggactctgggaagcgaccttagtactttggttcctctgacatctagattagtttgtcccttttagatatttctatttatattctcttagtatcaaatggtagttagttatataggtcttagttttaataaattgttctactaatatggtttggtcttagctatgcaagcactaaatgtgagcaatataaagttaatttaagggatcaaatataatattaggctgaaagcctattaaaaattatagaggaatatgtggaagacacattcataatacagagtatgaatatttttagattctctggtattggatttagatgtgcttgttctattttgtaaaacaaagaattgccctatatctttgatctgtgtgtttagatttttttagtgacagacaccttataataactagaaatagaaattccatctttggtggtaatatagtgcagggacctgagaagagaaggtcttaaggtgctgttaattagcaaaaatctgaaccccacagtctcaaagcaattaaggctgttaattgaatatttgggtgcttagaggattggctcatatgtggctggacagggaaccctaggcttgcatacaggagttacattctacaaataatcatgaacaattcagaaggagcaaatataggccaatgctagtagtcaactgcatatttgaatagtaatacattgctggctatatgcaaaattgtctttttactgtaaaagtaaatactaataattcaatctttcagcctatcttttgtaaatatggcacagtatttattcatggaaaattcagttttttaccatggtgattgtaccatcctctggtttgataaacatctctatgattcacctgatattttaaacacagttggtggtcacacaatggctacaatgtcatacttaggcacatttgggggacagaggagaaaggccattgctgatgagctcagagtggcagtgcttttattatccaattccttcatagcctttgtatgggcttccttagctgtggcatttaattaacgtgtgaacatacttctaaaaagaaacttaaaacaaatagaagattacaaaaaagttttcaagaaaggaaaaataaatgttccttttagaagaccttcagtgaaaagtagttaatattttcagtagtgcttattatttttaatagctctggctttggggtaggcttctgcttctgccagtcccaggcttgcaaagatgcaaacgaccgtccactaaagaacacccagaatgcagtgagtgaaaaatgaatttagtttctcaaactgtttcagtcctctgcacagttaaggaaaagagaaattatatgaatgcttaaaatccaccggttatcctccaagctaatgttggccagtagttttccatatatttggttaaaccttccagaaagtggcagaattgagcgagttgagggttccccccacttctttccatctcagtgtactttctggagcagtttgtaattttttttttttaaaagctatgaagtgtctttttaaaaagtggaggtgcttagcaggcagtaaaggatatgagcactgaaactaaacattcccaaacggatcatttccatccttatttgaggaattatgcattcataaggctggtgtgatttaggaacaggttattcaaagtgcaaatagatatcttcatgaatgaccagagcatataaaaaacaaattgtacttaaggtcctaactcgagtttattgtgcacatatatcttctaaaaatgtggagttaacctacttaggggttactgaccagggcttttaaaaggcacaggaacagagggctgaagtcgttaacactagactgagaagcacgtttaagggtaacaatgccacctctttggatcagaagagttcctgtttgttatgcaatgtgtgcacttcattatttacacgatttcactaggtgaatgggagctgtgtacacagccaggtgagcctgcagcagcgccccagactctgacagcgaacaccctctgtctactgccttctgctagccctgctttgaaacaatacccttttctggaaaaaaaaaaaaaaaaaacacaaccctaaatcatagctacttctctagataacaaccattttcttttcttaaacgtttttaggaattaatagaactttcttggaaaaatttccaaactcgtttccactgcgctgaacggacgatttaaaaagtaaatactcagaagatactaagaagattccgctggagagtctctttttattgtgttacggggtctcctagccctctcctttctcctacccacggcagcccatctctctcctccaggaccccttctttttggtatttcctggagtacggatgaaaatgaataggtgagcagcctctgggctaggccaggcacacaggggtcccgagtgaccttgggagacttgcgggcttctggaaggaaggctcgggcggccaagcaggagtcgccgcagcgaggaagcgccaggaggcggcgggggcgaccccgggggaagggcgggcggggatgcgccgaggtttccgtgacttgggactagtcgccccgaggcgcattctaactgtcggctcccctggccccaacggccagagagagaagggggcggatcctcgcgtaccagacacgccccggtcgggtataaaattcgccaggcgctcgctccccaggccacagccgctccctcgctctgctggggcctccggacgcgcttcccacgcgggtctctggaacactcggtccgaacgcacgcctgcttgcactcacactgcggttcacacccggaggcgctctcgcactcacactgccgctcacgcgtgctcacactcccccacgcgcgctccgctccggctccagccccgcgcccagcgaaggcgcaggcactgctgccgagagcgccgaggggccccgcggccttcccatggcggacctgagcttcatcgaagataccgtcgccttccccgagaaggaagaggatgaggaggaagaagaggagggtgtggagtggggctacgaggaaggtaagtggccgcgagtcggggtgtccggggtcccgcggcggcgtcagtgtctcgccgagcgcgggactcgagtcctgctgccgctgcgcgctccgagcacccccacgccccctctttcccacgggggtctctgccactttcccactcccctggtgcgtttcgggcgggaggcgctccagggaggcgtgctcgccgcctgcgctcttccgccgcctgcgctctcacccgggagccttccgcagggctggcgttcgcacctgctgcggtccggagggcgggctagcctccaagccgtggctgtaccttttatgtcttctgagtagtcaagaagagcagcggtacattttactaaacacctgaggaagacagtgttagcgtgaagaattcgtttttggcttggagactttggggagaaagtgtttctgcctctggtcttttcgtgaagcctgctagcaatgctcaagtctttctaaaacatgtcctaaatttcagactgaatcattgggtttggcgagaagcggttgactttctgaaaaactcgagtttcctagatttattcctaaagacctagggctcctattagagccaaccagtagtgctgatgtttactacatatgttgaaaccaatatagaatatataattttaattata

SEQ ID NO: 246 - DNA, 6000 bp, Homo sapiens
gccatcacagctcaatgcagcctcaacttgccagactcaaggaatcctcccacctcagcttctcgagtagctgataatacagacacaagccatcatgcccaactaatttcgtattttttgtaaagacggggtttcaccatattccccagactggtcggaaactcctggcctcaagtgatcctcctaccttggcctcccaaaatgttgggattacaagtgtaagccatttcgctggcctataatatatcatttttaactatagttattctgtagtgctatagaactctagaatgtattccttctatttagctgtaactttcttagagaaggtggcatgaaaatgatatcaccgtaatccccaagaaccaacaaggaatgaggtttcaaacagagtcgcaggggatctctagaggaaaagtgtcaggggcagaatttactaactgttgctgtccaagagtatagtctctgcccacctggttctctgccatcatggagaaccattatatttgcagtagtaattatggttttatcagatgaggaaatgggtttccttcaagaggcaggtgtgaaataataggttggcgcaaaagtaatcactgtttttcccattactttatttttatttttaaattttgtgtgtgtctgtgtgtgtgtgtgtgagatggagtctcactctgtcacctcgactggagtgcagtggctcgatctcgactcgctgcaacctcccaggttcaagcgattctcctgcttcagcatctggagtagctgggattacaggtatgcaccacgacacctggctgatttttgtatttttaatagagacagggtttttctatgtttgaacgttacaggtaacgttttactcaaagaataatattaatgatgagtattgaagcaagtcaataagcaagatgacttaagagtgaattcatcatgcaacagctcatgcctataatctcagcactttgggaggctgaggtgggaggatcgcttgagcctaggagtttgtgagacatgcctgggcaacatataaagaccccatctctaaaaaaaaaaagatttaattagctggatgtggtggcacttgcctataatcccagagatttgggaaactgagatgggaggatcacttgaggccaggcgtttgagatcagcctgggcaacatagtgagaccccatctccatttaaaaagaaacggagagtaagataaccatggacacccactgtgttctgtaatatgttaatgaggtttcctttaaatgtttagatccctataatgtcaatgtgggaaagcaaagaagtgtgtgaaaactcttaacaaactctcctgtatcctataaaacactggccttgttatttggaattcacttgagtcagatccttttttatttatttattatttggaagagatggagtctttttctgtcacccaggctaaagggcagtggtgtgatcatggcccactgcagcctcaaactcctaggctcaagtgactttgccaccttgacctcccaagtatgttgagattacaggtgcacgccaccatgtctctgccacgctggtgtgcaacagcatgattgtggttcacggcaatgtctgcttcacaggttcaagcaattctcctgcctcagcctccctagtagctggcattacaggtgcctgccactatgcctagctaatttttgtatttttaatagagatgggatttcaccatgttggccaggcaggtctggaactcctgacctcaggtgatccacctaccttggcctcccaaagtgctgggattacaggtgtgagccactgcgcccagaaaagaagatgttacacacacacacacacacacacaccacatggaatactaggcagctgcaaaaaaaatgaaatatcttttgcagcaacatggatggaagtagaggccattatcttaagcaaaattactcagaaacagaaaatctgcacttgtacctcctcaatatataaaaagaaaaaataaaagataaaaatagaacaaaaattttatcttagcatatatagaaatatatatatcatctatgcaaaatatatatcatatatgatatatccatacttatgtacgcatgcattaacgcaaatgtattatatttaactcagtatagatatgtaatggatattatatattatatatacattatatatacacacatatacacacaaacaccgacgtacggtacgcatgcttaaagaatgttcagctcccctcacagatggtatgaatttttttttttttttttgagtccaggtctcattctgttgcccaggctggagggcagtggcacagtcacagctcattgcagccttgacctcctgggctcatggcatgtttgtgccttcgcctctgattgtgctgcgattataggtgtgcaccaccacacctgactagttgttaaatgatttttttttggtagagatgggggctgggggtggggggggtggcgctggggggcttccgatgctgcccaggctggtctcgaatccccgcacctcccaaagtgctaagatcacaggtgtgagtcactgcgctcggccagattgtacaattttgattcctctcatatttaacaacacctgtacctatcatggtattaaatttatagctcattctggtttagggtcagggacttatttctttggaatggcagagttcagcatttcctgacccccctgcaaaataatgccacttcattaaggcgataatgactcttccatgtctaactcataggcactttccttttttgtctctcaagtaataggctgtggtttctcaaggatttttatgctgtggtttctgaaggatttttgtgatcctttcaaagcagcttttgtcaagcaaggtgttgtgaaatgtgcagggtctgtttataagaagaggtaggtatgtggtcaagttcagggtgggttcggtggaatcagaccaaccagcagcccaagcagagtgttaacgctgcaaatctgtgccacgttcttcttcctgcgtgcaatttgcaggcaaagacatatgcttaattgggtgtgaaacccgggccttgattaaaaggactttatgaggccgcagccttacatttccaaggtcaggccctagtggagagggcgcgcgttccgcggggagacacgaacttttcctgagtgcgcgttccttgctggtcctgaacccctcggccaggcagggcttggcagggccgtttcctgtcctaaccaggatcaagggattgcgcggcttgctggtgaagcttggcagggccgtgacctgtcctaaccaggctcaggggatggcgggggcctgctggtgtcgcatatgttttgcattccagctcaggattttgcagcgcatagagagcgggcgtcaccactagggggatatgctacccacaaaatgcaggtggaggctgggcgaggctagcagccaggggccagaaatccaaagcctgagccaggttcagacttcctgactcccactcccggttagctgtgcaaggatggctcggcctggtccccctaaaaatgtgtccgttctaacttagaggccgctttggctctcagaaagcccccctgacctgaggactgagggactggagaccgctttcagtcgcagaatcgctgagatccctcaaaacaaaggcgtttccagtttgaccccttgctgctcaatgtgtggttggccaaccgacagcctggggcgccctggttgcgggtcaggggagcagcgtctaggccgtgccaggcccgcaagttaagcactgtctgcatttccctggggaaaggggtgaccaaatatctagctatatttgcatttcaaatccacacggataagagttttaaatataagtatgtccaactattgcctaagccacacttacgctaggaaaaaaaaaatctttgcgtttctgaaattgaaatgtgtctgcacagttctttatcaggttgtcgccggggtgtttaaacagtgaccaatcaagtttcacacgctacatttggtcgggcgacctctcaaatctgtctttccctagttctttaaataaatgtttatttggaaagaattctagatccacaggaagctgcaaacaaacgcacagagtcaagcccaccctttctccccctttccaagtaaaaatgtggaatcaccagtcctacgacgaaaccagggcgctgaccttgttccccagacccggcagcccctcttggggatccgcgcgcagcgcgcgtcctgagtagccaggctaattccagcccctctcctcaccaaacgccaatttcactttctatttttgagcttcacttttgctgagccacgccctccctgtccccgggccacccagcctccccatcttccgggtttgggtgcagcaacgcgggtggcccgccagtgcgactccggggagaagtcatcctgggtcccaccccgggggcgccccgggcgcggagggggcgtgggcacctccccagcgccgcccctgcccttggtgactggagtcgcctgcacgcccgggtctccgactcctcggctgggtcgccgcccgggcggagcccacgcgaaggcgacgccccccaaagccccgcggccgggtgggggcggggagaggcgtagtcacgcccaggctgcttccgcccgccccaacagcgcgcacgcggccaccgagctggaggaggcggcgggcgtgagaccgggaatgcttggggcccccgccttcctcgcagccatccagcactcggtgcacgccccgcgaggccagcggctgctccctcccggggctattgctgctagtgccgtgagcaccgcccagccattgtctctgtgtctccgtcagccgtgccgagccgcgcacccagaggcgagggcgcgcatggggagcctccgttgatgctgccgcggctgccgcgccgccctccgaggctgcgtcccggggagtccggcttcccgagcgctccggcctggcccggcgccccggacctgagtgcctccccatggaggcgcccgggccggcccaggcggccgcggcggagagcaactcccgagaggtgacggaggatgccgccgactgggcgcccgcgctctgccccagccccgaggcgcggtcgccggaggcgcctgcctaccgcctgcaggactgcgacgcgctggtcaccatgggtgagtgagtgcgcgcgggaactcggcccacaggggctcgcggcgcggccgggaccccgtagtaggacaaagggccccgggtgcccgcttcctggggagggccctgcagcgggatccccgcgcggggctgcccttgcgccctgggtctccccgggggcctctcggagaactggagcgcaccctccagccccggcgagtcccccggactggctgggggccttccctggaacgccgagggctcctctggaagaccactctgtatccccagaacacacagcactctggggcctgggccgtccgacgtcacaaaacttcctgtaggacatctcgcctagagtacctcgtgcgctctcccaggcagcggccccagggacacgggcgcggggtccctcaggccagcctccccgtgtgcccagcggcagggtccttggcggggaatgtacagatttctccatgggctgcaggagcagctgggctccgggggacagttgttcgtggctttgtggggatgaagacggcggagttggggacggatcctaacatgtcctgacaccgcctgtgctcttcgtcttgtgcgtctgaaatgggtaattcttgtattggacgctttatccgtttcctttgtcgtctgtctttgaacttaacctcgaatgggcagcttgacagaggtttcgagttcacagtgcgtttggatccggacacgcgctggtttatgggggcagcccagagtgggtcagaatatcccagcggcatgtgggcgctggatttaaacagttgtcaccggcccgcctgtgcttcttagggactctgtatggctaagtggggtgttggttgt

SEQ ID NO: 247 - DNA, 6000 bp, Homo sapiens
accaagcctaagacagaggagagaaaatgcagacggaaggaaaagatgaaaagaggaaggaaagaaaagagcacacctcaattaggccattttcataaaatcgagaggagccgggcgaccccaagcagttcagccagacctgcgcggccggcgggaccgtggagccaacctttcgggagaggggagcgtcgcgctgcagagaaatcctctctattcatcaccaccgacctgacggccgccatcgtcgccgccacagagtttgctccagttgggagaacgaaggcagcgggcgctcactttacaaaaaaataaaacgtagtttagcaaatgcccactagtgcgacgggtgggcgcctcccgcccccacccctcgttggcgggtccctagcctgggtgggggcgggagctgacaccgaggtgccaagtccccgttgccggaacccccgggggcgcggcggccgcgctcaaaggccgggctgtaaaggtcacaggctgtctgtggggccgagctgaatgggctcctggaggtaaacagactcttaactttcaacttggcctttaccttcctggaggtgtctggcgggtatgtaaaggagcacgctgaggctttcagcgcttttggctgggtcagtaaagaaagctgggggaggctccgggctcccggagggtctgccaggaggctcccagcaggacacaaaggcatctgtggggttaggggaaggccaggctcagcccagtcagtctggaagatcaggacgcctgggttgtgcagggacttccccgctgaacccatgtagagccccagggaggacttggaggctctgagcctcagtttcccgatgcgagaactatgtagcttacgcagggctgagggggcaagtgagaagtgactgacactctttagggcaactgtccttttcaggtaaaagcaggttgcttgtaattcattagaaacagaaacacatggaggaatacaaatagagctcatatttattcagattgtgaaatgcttttatgtgcaaaatctcattatatcatcacagtatgtgaggaaagaattattatccatattttacagataaggagacttaatcttactttacctgatgccggttgagatctatgataggtcatgggcagatgcacacacatacctatgtacaggaaataggggcacatacccaagtgttaataaatatgagatccaaagctgggtgtggtggctcatgcctgtaatcccagcgcattgggaggccaagacagggggatcacttgaggccaggagttcgaaaccagtctgaccaacacagcaaaaccctgtctctactaaaaatatagaaaattagctgggccatagtggcacacacctgtaatcccagctactcaggaggctgaggcatgagaatcacttgaacctgggaggcggaggttgcagtgagctgagattgtacaattgcactccagcctgggtgacagagtgagactctgtctcaaaataaatgaaatgaaatgaaagaaaaatgagatccagaactgttccctgggatctagcagatgctaaataaattgtaaagcaaataaaacaagcactatagaatttatttgtattgaaatgtatccatttacaggagggtctccagcacagctggtgaccttcactcccgccaagtttaagttaaccatctctgcattccacaacactgcagttacatgcacttggctacttatttcaatgaacatggataagaatgctatacatccaaaagcacagtttcaggaagtgttgcaatgaattaaaaaaatttttgtttttaattattttccttaacatttgagatatagctgatatgcaataaagtgcagaaataccaagtgtatagcttgatgaattttcacagtgaacaaagtcttgtaactagcagacagattgagatggagactatttccagcaccccagaaggcttctttatgtccttttccagtcaggagacctctccccatgccaatctctattctgacctctatcactataccataattttgcttgtcattgaactgcatagaaatgtagaaactgaatcatacaaaagttactcttttgtgtctggcttctttcatccacatatctgtgattcatcaatgttgtgtgtagtagtggtttattctttttcaaatggctgtgtagtacttcattgtataattatactgtgctttctttattcatgctactgctgatagacttttgggttgtttctagttttgagctactatattttgatttcattatgagatggggtatccctattatccctattacccctgttgcccaggctggtttttttttttttttttttttttttttttttttttgagatggagtcttgctctgtcacccaggctggagtgcagtggcacgatctcggctcactgcaaactctgccttccaaattcaagcgattctcctgcctcagcctcctgagtagctggggttataggtgtccaccaccacaattggctttttttttttttttttttgtagttttagtatagagagagtttcaccatgttagccagtctggtctcgaactcctgacctcaagtgatccacctgccttggcctcccaaagtgctgggattacagacctgagccactgtgcctggccccaggctagtcttgaacaccggggctcaagcgatcttcccacctccactaggattagtagctaggattacaggcgtgcgctgccatgggtggctttgagcaactacagataaagctgctgtggacctactagtacatgacttttgatggatataaaggttcatttctgttgggtttatgcccaggaatggaattgctgggtcatagggcatgactatgactattattattttttaaatttagggatctattaatgcctctactgtacaaggatgaataaatgtgcatgtgtgggtgtttgcctagtggaaactaaaactgtggacatgccctacatatctatcatctaccaagtaaaaattggtgaaaaattcttagtctttaggtaaaagtctggatatttctgcagttcataattagacaagcaagaaactctggtgagaaactggaaagcactgaagagacatctcctcccttttcttccatattgttttcaaatgcgatctagtgaagatttcgtgcttggtgtcttcaattatagcaatgctcattaggagtgatgtacactactgcctgtgggccctttcccacaaagtggctcaagttcaaggtcaggttggtgagaggctatgattgagtctgcccagagtttagggtaagccattccatataattgtcaagaccctcgtgtagaatggaaacattcctgtcttctccagaaaaactgggagttctagaaaaagcagacagaaggatttgatttgggaggggtagtaaaggaagcggaaaacctctaaagacagatttgtgaaacaaaccgtttgattcttctgaattgcactgcacattaggccccaacagaggggcctcaagcaattctgccagtggctggggtttccccttccattcccttttccttgtaaggaagtttaaagcttgcaggaggcagataggggtcttgggctttctgggtactcagcttgtgtgggagtatgccagtatcagggacagtttcctgggccccttgcagaccatagggagaggactgcagggcagggagactggcatctccacacaggcgtctgtattcttggggtccagaactcccgcagctggtttctggcagtcagccaggcttggcttcctcagacttctttagatcccaaaaaagggggaaagtgcctctcttctttctcttttctgactgacacttcaggattttacaagattttgtcccatccgctctgtcagcttctctctttccctctttgtgttgctgtccctgagtctcatctctccctctccccgtccctccctcaagtcctgtgggtctccgtccctccgtatgtctttacttaaagggaaatccagacccttccacaggccactctagaggctccatttccccttcaggtccggaagtggagtgtcctgggttccatccagatcgcatgtcttctacgtctacgttcgtgtctcccgcctcttccctcagcctcacccgaatcagggcctccagagcattctgggcagtagcgagtccctgggtaaggggcgtccagggcacctccctggggcccggagcagctcattccaggacatctgggacaggaagggtaccgggaatgaactggggtgctagtacccaggacccaaagccaggggctgccagaaatacctattaacccccatttcccagcctcctcttacacaggcgcattcccgggttctcctctgaggccgggagcggcctcccagccccacccccgactccccttcccccccaggagatggacactttatagagagagctttttattctctcgttaaacctgtcaaagcgcaggagacagaaagctagggagggagaggaggagaaggaggtggggcccggctcctcgtcccctcttcctccgcccaccacgcctcccctccccccggacgtgtaaatgagactctgcaaactggaaagcagcgaaaggacacctccttccttttctctcttgttgtttttaagtggaatgagagagagaggagtggagagggaaaagaagagagagagggagaagagagagaggagagaaagagcgagagagcgagagagagagacagagacagagagagagagagagagagagagagagagaaagagagagagagagagagagaataagctggggtaaagtattttcgcagtttctgcctttaggattttattagcttctctcccccaggccgcagccaatcagcgcgcgtgcccgggcccctgcgtctcttgcgtcaagacggccgtgctgagcgaatgcaggcgacttgcgagctgggagcgatttaaaacgctttggattcccccggcctgggtggggagagcgagctgggtgccccctagattccccgcccccgcacctcatgagccgaccctcggctccatggagcccggcaattatgccaccttggatggagccaaggatatcgaaggcttgctgggagcgggaggggggcggaatctggtcgcccactcccctctgaccagccacccagcggcgcctacgctgatgcctgctgtcaactatgcccccttggatctgccaggctcggcggagccgccaaagcaatgccacccatgccctggggtgccccaggggacgtccccagctcccgtgccttatggttactttggaggcgggtactactcctgccgagtgtcccggagctcgctgaaaccctgtgcccaggcagccaccctggccgcgtaccccgcggagactcccacggccggggaagagtaccccagccgccccactgagtttgccttctatccgggatatccgggaacctaccagcctatggccagttacctggacgtgtctgtggtgcagactctgggtgctcctggagaaccgcgacatgactccctgttgcctgtggacagttaccagtcttgggctctcgctggtggctggaacagccagatgtgttgccagggagaacagaacccaccaggtcccttttggaaggcagcatttgcaggtacctctattaccctgggtccccttgtctctgagcctggggttgtgggtcccaatggcatttccctgggaggaggaggagggagacttggagctggtgaggatgagcttggtgctcctcccttggttattaggactctgaaggaggtctgagtagctggagggcctggatggaggtcagtgtgaggggcctgagctgggtgctatctgaagcctgaaggccacctcacttctccaggaggccctgggaccagcctttcaacatgtctgagaggtttagatctctttgctgttgagtggggatcaggg

SEQ ID NO: 248 - DNA, 6000 bp, Homo sapiens
gacttctggatccggggtagagggcggctgcgctggacagctcgggagggggcgagggccgggcggacggcggacggcggacggcgggcgggacggccaggacgcgcgggctcggaggaccgcgggacggccggccggccggccggagcccgcgggggcggcggggcgggggcccagggcaggcgcggagccgggccggcaggtgagcgcgctgagggctaggggaagtggccgctcgggctcccggtgcgccaggattggaacgcacccgagcggctctcgacaagagtttgtgggtgggggcgccgaagccttggacgggtcgtctcggcagtgttgcccgagggagttggggttggcaaagggaagtcatggaggcagtgggatcgaggactcctaggtccggcgctcgccacccccgtcgcccgccgcctgcctccctccacggggcgagttccaggctggcccggaggccaggaggatctggcacgtactgggggaggggctggcctgagttttttgctgcggggctgtggggtgtctccgagtttgggggagattccatttaggggagaggaaccggcctgggcagagggagggatgccctctgtctgcgggagtccctctccttcccctcacccaaaaccttgggaatgaaaggggtggggtcggctccccacatcccccaaggcctgccgcagggtgggcaggggagctgactttattcaaagcagactctggggctcgactgaaaggctagaggtggaatcaggcgtgggagcctctttgcccatatcctctccttaccagattacccctgtgagctggagggacctggtgggggttgcatagtaaagggtgatgtgggagccctctgtaatctttagggagagtgaggactggggatgggagaaggcggcagcgggcactggaccgacagatacaggccctgggtaggctcctctacatctggaaaggcccagaattgaagaattgaggcccatgtccgagtatggtgggtggtgctggcactgctgggccccgcctgggcagtgcctcttaccatgaactttctgaagtcgtttttaatcccctggagcctccttttgccaaggagggcaggggcagatgggccctggggatgggatagacaggaggtggccaggaaggcttggcaaggcagtgggcagagccatccttagggctgggccttggccttggctggttccaaactctggtctcagcctgatcagggtttgggagggacttgaggtctgggaggcactgagcctgggcctgccaggctgaatgggacatggctgtggctgtgggagccggtggtatgaagaacagcagatctgtgagagtgcaaatggaccaacactcaggggaggagaaggtagaggcacaaggcttaggagcctgactctggggaggagggaggtggtctgtgctcccagggctcatagtgatgggttgctggacaaagtgggttgggggaccatatagagaaattttgtggcttggaacagtgctctaccctgtttcctgccataccagtctggcatggggtgccagaaatgttgggaggccggcaagttctgcgggatgggcagtgcctggagtggagcccagggtgggatggttgcagttggttggacaattacatagctctgaagctatccccttggggggggtcagagtgttcctgggagggtcatgcattctcctggatagcatttgcccctttctctgtgagtatgagccagatgctaggatgtgtttccagggggcttggaacatggccagaaactagtcctttgggaacaggtccgggccagtgctggtgggggtggtgtgttgggggagataagaacagggaaggggactggtgaatggaggaggctgaagcaaaatgttgtgggtggtggatggtggtgggaaacctgctcactctgggctctgtctccagcagctctggggactgacagccaaggacacagggactgatagaaccaggcatctgactggctagaaagacgtgtgttcttgctcatgatttcctcatctttccatctcttgacgatgacagaggtttgggtttaaagtgttgtagagtgaggagaagaactaatatttttcaagtgtgtacttcttgacaggcattattagattctttcctgaggaccattatcatttccattttgcagatgaaggtactgacacagagaggttaaataacttgcccaaggcagtgtggctagcaaataatcacgctaaggtttggaaccctggtctcatgccaaagatcatgcttctaatgaagtattttgaagagcaaggctttctttggtgaccttttccaaatgccagcctgaccaaaagtcttgtattcctgatctgtccttccagatggtgctgttggtgatgttaagaggttgaaggggccaggcatggtggctcatgcctatactcccagcactttgggaggccgagacaggcagatcacctgaggttaggagttcgagaccagcctggccaacatggttaaaccctgtctgtactaaaaatacaaaatttagccgggtgtggtggtaggtgcttgtaatctcagctatggggaagccgaggcagaattgcttgaacccaggaggcagaggttgcagtgagctgagattgtgccactgcactccagcctaggtggggcagagtgagactccgtcttaaaccaaaaaacaaaaggaggttgaaggacgtgctgctctgtgggatataggagaaggggtgctgacagatcttggctgagggtgactcagggatgggaggtttggggtatgcagagaattccccagcctgccttctgcgtgtgggtccctgggtgtctgcttcaagcgctgcccatctggcttgagctctcattctatggccacctggggcaagtgctgagtattcctccatcctgtccccgagtgagtacaaatgtcagtgctgctagctcagcaggtttaattacaagggacccctcagggtactctgtgagcatagaggagtgtggccctggtggggacacaggcatgcatggatgacagtgctgtcagcctcatcttattctgacctgggctcagccaggagtcacattaaaggtatcatcatggagtcctcccacctcagttcatgacatttcctccaggaaatgtgggatctgggactgatttggttaccatgatctctataacttgggccagccatataaaactgccatggacctcagtttttgtttatatatatttttcctttcaaatttgtcttgtgccccagggggcaacaggaccagtttctcagggttttggtgaagatcagatggaattagggatgtgaaaagatcttgaacagtttaaagcatagagaaagtgcatggagtatcattcgtccatccatccagtcatccatctactcaatgaacatttattattattattttattttttgagatggagtttcgctcttattgcccaagctggagcgcaatggtgtgatctcagctcactgcaacctctgcctcctggatttaagtgattctctcacctcagcctcccgaatagctgggattacaggcatgcgccaccatgcctggctaattttgtgtttttagtagaaatggggtttcaccatgttggtccggctggtctcgaactcctgacctcaggtgatccactcacctcggcttcccaaagtgctgggattacaagtgtgggccaccatacctggcctcaatgaacacttgtttaggtccttctaagggttgtggatacagcagtgagcacagcaggtcaaaatccttgccttcataaggctgacattccagtcaggagagacagaaaatgaacacataagaaaaatatatagaatggcagttgctgattagagctatggagaaaaagcataaagctgggaaaaagatagagagctccaggaaagggggttgctattttaatagggtggtcagagggagcctcactgataaggggacatttgggatgtgacctggaggagctcttgttccagacagagggaacagcaggcactgaggtcccaggctggcctgtgcggggtgtgttgggaaacagcaaagaggttcttgtgactggggtgcagtgaggaagctgaagagccttaggattatcactgttagctggtggcagatcatgaggtcaggagatcgagaccatcctagctaacacagtgaaactccgtctctactaaaaaatagaaaaaatttccctgggcatggtggcaggcgcctgtagtcccagctatttgggaggctgaatggtgtgaacccgggaggcggagcttgcagtgagccaagatcgtgccactgcactccagcctgggtgacagagtgagactccgtctcaaaaaaaaaaaaaaaaaaaaaaaaactccagattttttcttctgcttctgttgagaaaaatcagatcgggacccactgggacccagtggcaacagtctacagctgctgggtggtgcctgccccatgcacagggtatgaactcttttcctcccagttctgaaccataagctgcttcactcattgacttgggcacttgagtttgtgaccaccaacaaacagtgccttttagggaaattttcaagtatactggctttggggtcagacaaatctggtttagaatcgtggttctctcacttatgtggctgctggatctttgggcaactctttcttcttttcttttctttgtattttattttattttattttattttatttccctcccttccctcccttccttccctctctccctccctccctccttttttccttccttccttttttttttttttttcaggctatggctattgcccaggctagagttcagtggtgcacaatcctggctcactgcagcctccaccaccagggcccaagcaatcctcctgccttagcctcctgaatggcccggtctataggtgcataccaccacaccaggctaatttttttttttttgagacggagtctcactctgtcacccaggctggagtgcaatggcgcgatctttgctcactgcaacctctgccacccgggttcaagcaattctcctgcctcagctcctgagtagctgggattacaggcgcccgccaccacgcccggctaatttttgtatttttagtagagacgaggtttcaccatcttggccaggctggtcttgaactcctgaccttgtgatctacctgccagggccttccaaagtgctgggattacggacgtgagccaccacgcctggcccaggctaattttttgaaattttaatagaggcagggtcttgctgtattgcccaggttgctctcacattcctagccttaagccatcctcctatctcggcctcacaaagtgctgggattacaggtgtaagccactgtgcctggttttgggcaagtttcttgtcctgactgtgtcttgggttctcacctgttgattggggatacccttgttgcctacctccaagtaattttatgaggatgaaactcatagcttgtcagtgggaagtgcttaggtaatgagctactagtggtggcagtggctgtgatggtggtattaataccactcctactggatggtctctaatactatctccttccttccctaccagcaacatgtcatggtttagtggcctcctggtccctaaagtggatgaacggaaaacagcctggggtgaacgcaatgggcagaagcgttcgcggcgccgtggcactcgggcaggtggcttctgcacgccccgctatatgagctgcctccgggatgcagagccacccagccccacccctgcgggcccccctcggtgcccctggcaggatgacgccttcatccggaggggcggcccaggcaagggcaaggagctggggctgcgggcagtggccctgggcttcgaggataccgaggtgacaacgacagcgggcgggacggctgaggtggcgcccgac

SEQ ID NO: 249 - DNA, 6000 bp, Homo sapiens
aaattaccttgggcagtatggccattttcacaatactgattcttcccatccatgagaatggaatgttcttccatttgtttgtgtcctcttttattttgttgagcagtggtttgtagttctccttgaagaggtccttcacatgccttgtaagttggattcctaggtattttattctctttgaagaaaactggcacaagacaaggatgccctctctcaccactcctattcaacatagtgttggaagttctggccagggcaatcaggcaggagaaagaaataaagggtattcaattaggaaaagaggaagtcaaattgtccctgtttgcagaagacatgattgtatatttagaaaaccccatcgtctcagcccaaaaatctccttaagctgatacttcagcaaagtctcaggatacaaaatcaatgtgcaaaaatcacaagcattcttatacaccaataacagacaaacagagagccaattcatggttgcaatttttaaataggatgacatttgaggtgagatcaattctacatggttgtctaaagaaaaaaattctaaagactttaaagaaaaaaattccaaagacttacaatctaaacatttagttttgaccaggtgcagtggctcatacctgtaatcctaacactttgggaggctgaggcaggaggatcacttgagtctaagaagtcaagctcagcctgggcaacagaatgggaccccatttctatgaacaaattaaaaatttttaaatttgcttttcacgcctgtagtcccagttacttgtgaggctgagctgggagaatcgcttgagccctggaggtctaggctgacatgagccatgatgacactactgtactccagcctaggtgacaaagtgagaccctgtctcaaataaataaatacataaataaatgaaaaccaaacatttagttttaattctagcatgatgctataattctacttcctcaaagacttcattttaataagtaggaaactataatactaggtcaatattaataggaatgactacattttgaaaagcaacattgccctaaagatatgtatctttcctacagagtaatggctgtcattagttagaatcataaaatatacaggaaatggcagttttgttattttatttttcaacaccttatcatgacctttatgcatttgcgttcctataaaagtaggaaccttgctgtggtcataaactgagagaagcagtggtggaggtgggatgtaatcaccaataaagattagctaagtttctcttggctatttatgactttgttaattataaatttgtctcaacacttttattcttttttaaaattttttaaaatatggaacacttcaatttgcatgtcattgttgtgcagaggccatgctaatcttccttgtattcttcaattttagtgtatgtgctgctgaaacaagctctcaatacttttttaaaaaaccttgagtattatgtgttgataactattctatttcatgtgcgttggctcattaaatctctttattcaatgtctcaacactttatttatccatttattagcaaaaaggtcttgctctgttgccctagctagatcgtagtggcttgatcatagctcacagcagcctcaaacttctgggctcaagcaatccttctgcctcagcctccgaagtagccgggaccacaggtgtgtgtcaccaggcctggctaattacaaaaataattttcttttttagatacggggtctcattatattgcccagctggtcttgaactgctgacctcaatctatccttccgcctcaatccaaagtgctaggattacaggcatgagccattgctctggcctttgttttgttttcaatgcctgtagggaattaggtcagttctttactaacaaagcaaagcattatatgatcaaattttgaaaaatgagaatttttgatcaaaatgcctaatgggtcttttttagtctttattacactgttatttccacagtgacttgtaactaggtgcttaatatagattctgaaaggctgtcaatacatttaaatttgtatatagtatttcagtttacaaagcatcgcgatatatatctcatttatctggttcagaatatgtagtttgaatacacaattatattacagcacatttttcctttcagttctattttatttatttttttgagatggagtcttgctctgtcgcccaggctggagtgcagtggtgcgatctcagctcactgcaaccttcgcctcccgggttcaagagattctcctgcctcagcctcccgagcagctggcattacaggcacctgccaccacacccggctaatttttgcatttttagtagagacagggtttcaccatgttggccgagctggtcttgaactcctgacctcaggtgatccacccacctcggcctcccagagggctgggattacaggcatgagtcaccgtgccccgcctcagttctcttttaaagggaatctgtattttcaagaattacacacatcatactcaaatataaatctgacattgacctaagtttgaagtagtaatggccaagatctttcaagcagcagcaaactaatcttgtttaagaggaggtattatagaatcataagcacagaggtccaataattagaccacacagtgcttacaaaggatagccttagaaaggttcaggtgtttaggtagagcccttctccccttctcaaaccattaacaaaaataaaaataaacaaaacaaaacttttccttgcaggaaaatttccgtgaacctgtggttttgggggcaaggatgagagcaagaggcaaaaactagttcagaacctagacaactagtggagtctgcaaacaaatcaaaaccaagataggcatggttggtgagcatgtaaattggtatagccactatggaaggcagtatggaggctcctcaaaaaattaaaaatagaactacagtataaaccatatagtatataccatatatatcatatatgcatatgtaccatatatacaatatatacgtatataccatatattctgggtatatatccaaagaaaatgaaatcagtatgtcaaagagatatctgcatcaccatgctcattgcagcattattcataatagccaaagtatggaatcacctaagagtgaactgatggataaagaaaacgtgaaatgtaaaaatgtggtatatgtatgtatatttatatatataatgaatactatgcagcctttaaaaagaagaaaatcctgtcatttgtgacaacatgggtgaatttatgctaagggaaataagctaggcacagaaacacaaatacttcatgatcccacttatatgtagagtcaaaaaaagtggaactcatagaatgagagcagaataatggcgggatcttggctcactgcaacctctgcctcccaggctcaagtgatcctcccatctcagcctctcaagtagctgggactacaagtgccactgtgcctggctaatttttttatttttttgtagagatggggtctcactatgttgcctaggctggactccaactcctgggctcaagggatctgcccgcctcggcctcccaaagagctgggattacaggcctgagccacgacacctggccgaccttaaatattcttagcacaaaataaacatatacacacaagcacacacgactatgtgaggtgatgggtatgttatcatttcacaacatatacaactatgaaaacatcacatggtacactgtaaatatatacaatttttatttaaagctagaaaaattcttttaaaataaactaaaaaggcagtccataagcttctgttgaatggatgaaaatctctaccataaataaaaacataatatgcaaaggtattaataagatttggaagaaaacctaagagagtattaacagtagtgactactggggatcaccgagatacagggtattagggatggaaggtttacttttctctttttttttttgagacggagtgtcgctctgtcgcccaggctggagtgcagtggcacgatctcgactcactgcaacttctgcctcctgagttcaagtgattctcctgcctcagcctcctgagtagctgggactacaggcgcccgccaccacgcctggtgaattttctgtatttttagtagagacggggtttcaccgtgttagccacgatggtctcgatctcctgacctcgtgatccgcccgcctcggcctcccaaagtgctgggattacaggcgtgagccaccgcgcccggccggaaggttcacttttcaatggatctttgggaagtttcaaaacatacatgctcaacctttaaaaatttctctaggggaaatcccttctccacatcctataggtgtgcttccttcttcctctccacacacttcactatcaaaacctacattacttccaacagtcgaccctcgagggaataagtccctggtccccacgatcgggaccagccagtccacactgccgacccctgaaaggcggtctcagctgctcggtcagcgagaaaaaaagccggcgaggtcctcgtcctgcaggccacagcgaagacaaaaacctctggttactggcctcaggtgcaaggctgctccgcattggcagcgcggtaccattcctattattattacgtagtcttgtttctttctgggagaaagcacctagggagagttgggctggccccgcagggcgctccgggacacgcgtcctctgcaacgccgcagcctgcgccagcgttcgaccgggacgactcatcgaggcccgactcgcattttcagttgtcagattcgccactttttggtgtcagaatttaaaacaaaaattccaatttctctatttcagaagctctttctgtccagaaaaacacaagcaggagagacttcaggtttttgaattattcgtctcttctggcctccacggtatctacatccagtgagcggggaccgtgagtcgaaagcgacgacgcggatgctcaggccaccgttcccggcgcgcagtcgcagctgaccctcgctcccgcccccgcctggagtccgacgtggaagttgctggctgactgggcttgcgaggaaaccgcctcggagctgcagccgaaggccaaggaatcactgaagatcggcgagggaggacagggggttcatcatgggtgaggggttcgagaagggcacctgggcgcgctcgagggagccgcggccgagggctggggtgcagaggaggagaggggccggccaggataccctagagtagccagctcctcagggggcgggtcgcggaggacttgactcactttggatcttcatctgtaggggtggatccggcctctcgcgttctcctccgtcctctctcggttccccttgattcctgcggggtccagggacccggacagcttggggacgtccgcagagcctgggttcgagttctttacccttatcatgaagttttccctcatccccagctccacttgctgggcagagttgttcttgcggaggctggcaacgcgtcagtcgcaggttcgccgaggtttcttggtgaaagatgagctgcggccccagagtggaagcttaatcattctctttaccaggggcgctgggacggcgtcagtttgaaaaacctgagagcaggtgttgcttatgttgttttatggccagtttggcatttgtctgctaatctgctgtagcgtttcatgtaataatacgggtatttctagtcggcaaatgaaactttattcttggttcttggcccgctgattgagggaactgcattctcacaagcatcaggtaacaccctcgccccgctagaacccaagtgagggtgcacattctttaactcgtttctcaccctccaaatgaaggtgcagattctttggcttggttaaatccctccacagttttctggggagcatacttcttgctcccaagcatcacaggcgctgtcctgtcttccataaccgccttcagttttgttccgcctctcttctacctgtaaatggtaga

SEQ ID NO: 250 - DNA, 6000 bp, Homo sapiens
aaagttccagcttcctttaggtagtgcttattgtatttatctcatggccttcacctatgacctggaccccaagagcactccatttcctatctccacctcaaagtcttcgcaagtgtaacctaatataacattccaatttatccttgctacttaggaggctgaggcgggagtatcacttgaactgaagagtttgagcccaccctgggcaacatagtgacacgctatctccccttgtccccccagatttacaatttagccaatcatggagggtaaaggagagatgacaggaggcaccaataacagaatgtgctgagcattaatgagaagtgcagtgaagccccttacagcattgccatacttaattcttataataactgcatggtctaggtactactattattcccttttaaaatgaaaaatggaggcgcctcagagaggctgagcatctggttgtgctagtgagctacagcacgtgatctgactaaagagtctcaggtcttagccagtgtattaccctgtgtgaatgcacagttacaaccaggaaaaaaatgcaaaatgtgggcatcccactcactgtggggcgttctctccttatttggaagaaatagcacaatggtgaggatgtcacatacatgtaagtgggtgtgttagtctgttcttgcattgacaaaagaggtttaattgacctcgattctgcaggctgtacagaaagcatgattctggcatctgctcagcttctaaggaggcctcaggaaacttaaaatcatgcaggggagggagggtgggggcaaagtgggagcaggcacgttacatggccagagcaggagcaagatagcgagggaggaggtgccacacacatttaaacgatcagaactctcaagaactcactcactatcccatggacagtaccaagaggatggtactaaaccattcatgagtaatctgccctcatgatccagtcacctcccatcagacctcacctccaatgctggggattacaattcagcatgaaatttgggtggggacacagatccacaccatatcagtgagtgacatggagatgcactgcccagatttgcttgcaaagaaggacttgctgccgagctctgggtgctgtcagcaactggcccttttggagactgcctcagctgcagggtcgccttgaccaaggtcatgtcacgtcccaggatgaacgacatccaatgactgattcaggagggtatctaatggtccagtcatttaggctcaataattccaatgggccatctctcagatcccccagtgggatcaatgaaggccattgggtacaccccagctactccctttgcccatgctgcttcctgcctgtcccccacaggtgaaacatcttgtcagtgtctcagagcctgcttccctgagaactcaatctgtgacatcagtcccattgatcagagaagtctgtgtcctcttactttgttggtttccttcatagcttcctttcacatcagtttcctttgattttttttttttttgagacggagtctccctcttttgcccagtctggagtgcaatgatgaggtcttggctcacttcaacgtctgcctcccaggttcaagcaattctcccgcctcagcctcccgagtagctgggactacaggtgcgtgccaccatgcccggctaatttttgtatttttagtagaggtggggtttcaccatgctggccaggctggtcttgaactcctgacctcaggtgatccgcctgccttggcctcccaaagtgctgggattacaggcttaagccaccgtgcccggcctttcctttgattttttatgttccagataaatatctaaaaacaaaagtttatacaattctcaaagataggccacacacagattcaatccccctacccttttttttttagttaacagactatattttagagcaattttaggttcacaacaaaattgagcgcaagtgtaaagaggtctcctacacccctgttccccactagcccactccactatcaatcaacatccatttcccttggtttgggcaataaatacagattgtggaaataaataagtcctttttaaaaccaaaaattttattagactaatgtatataaatttttaattgcttgttttgttttgttttgtttttttgagatgaagtctcgctctgtagcccaggctggagtgcagtggctcgatcttggctcactgcaagctccacctcccgggtttacggcattctcctgcctcagcctcccgagtagctgggactacaggcgcctgccaccacacctggctaattttttgtgtgtttttttttagtagagatggggtttcaccatgttagccaggatggtctctatcttctgatcttgtgatccaccttccttagcctcccaaagtgctgggattacaggcgtgagccaccgcgcctggcctaattgctatttttaacatttgagtggtttgcagacttgattccaagaggttcttactgtgtggccttgggaagaccctttaaattttcaagtcctactgtcccatctttaaaacggaaataataattagtgggaggatttaattagacaacatatcccataacatatcctaactccaagcaaagtgcctggcacttaataaggattcaaaaaatggatatttgtaatataaagttggcccagcacaggcctcctatgctgcaacatatcacccaaactcagtgtagcttacaactgaagtttattctttcacacttctggaagcaggagactgcgctcagtttcactgggccaaaatcaaggtgtcagcaggatcttgctcacttcagagtttctaggggagaatccttgcctctgtgctggcattccttgccttgtggaggcatcgcttcaatctctgcctccacagtggccagccctcctctgtgtgtgctaaccaccccctttccccttataaaagtacatgtgactgcagttaggacccatcttgatcatccagaataatctccccaactcaagaagacccttaattgaatcacatatgcgaaggccctgcttctgtctatgtaaggtaatatgcacaagttccaggacttagaacctgttatctctggggagggaacatttttcagcctagcacacgggtgacacagtttctatctttattaagcacaatccaaaacacctttggaccatgaaaacagtcttttgtcccttccatcttgttattcaaaactatgttccttattttaaaaacctttcctccctgcctatcccagaagggacagcggctctcaaaggcagctgggtgaagtttctgtaagatctcagcactagctcgcgctgctgttttggaggcatctttccaaggctttaattaattagaggatgcattctagccctgtttcccaaacttacatattcccgatacctctgattcagtagattgcgcgacgtctggcaatccaattttttctaagtgccccaggggattcttatcatcagccaagatttggaaacagtaatttcttatacaaagtcctgaactaatacccttgaaataggggattccccttcactgccgggtgtgtcgcggttacaggactgagtttgttgagggaggaggaatgaacaaccctgaaaactaaactatcctaccttgtatattattcactgaaagagtttcctggagggaaaacttccaattccaattaaatcgaggatgacgacggcccggatttggcagtcctgcagctgtcactagctcgggacctcgtgcgtctgagtgatccagcccgggccgcgccctcacccagagccaaggctgtgagagcagctccagcgagggggcagggtggcggcggcagggctgcttcagggccggtgccggtgtcctcagagcggcgttttggcactggggtgggccggggcgtggctttcggcgccacctctgcaagcggccgccactccagagtggcgcaggtagggggcgtgggaagacctaagtatatttattccggcctgcgagcgggatgctggggttgctccaagggaccagaagagctgccctgtgtcccagagcaggctggttcttctgacagcgctgagaacctggcgctcgcgcctggccaggtaggggctgtgactggacgctcagaacatttgtgggagtgtggaaatctctttacgggtgatggggctcaaagtctgacgcagccgagggttgatggggtgcagtcacgctcagccaggggactttgggggcgcagtgtcaggctcagccagggagtgacaggcgcagtaccagccttatctgggggtgctggaggcacaggctccggttcggccaggcgggtgtgcgcgcccaggaagggtaggagcctgcagccgcagcggggggcgctggctggggctctgccccgccggcagtgcgctcgggcgctgttccagcgcgcggcagcgagtggcgctgagcctccgctttcgcagctcgcggggagcggggccggcgggaggggccgggcggggccaccgcctcctctgatggcaggctcctcctctccctccgcctccctcgctctccaccgcccgcccgcccgcccgcccaatccacagttcccggcccagccgagccgggctgcttgtctggccggcggaggctgagcgcgaccctagcaagccgcggcgcccgccgaccagggacaagagcgactcctgggaccccactctgccccgcgccgccgcctcctcccctgttgtcgcggggacgctcaggcccgcgccgcccgggccacgattctcctcctctttctcccggaggggaaggaacggagaaagccgagcggcggctccgggagagagcgagccgaggcccctgcccccgaggctcggggcaggaggaggaggaggaggaggaggcggaggcggagggaagtgcgcgtcactctcgggaggagagtatttcacctccaggcagaggctgcggctgccagttgagtacgagcggcagctgcgggcgccggcaatcgagtggcttcctggccatggagaggagatctggacccgaggacgccagggactcctctccgtctccctggaccgctgtgtaggcacctgagttaacggacgctaagcggggtaggggaaggtaagaagcgactcggtcacccgcccccccaccccgctccacctcgtttgctgccctcgggggccactgcggggacgcagacccgggtctcgcccaccttttctgctcccggcggcctggccggctccggcgttgggcatttctgccgaaaaggaaaacgtcctcccgcccttcccccgtgcgcctcctttcccggtttcatctctggattgggactgacccgactccccaggagtcagtcctctcttcttaagaaagggtcctcgggaacggtgtcttgatttctttctctccactctctcttttcattacgtttacggggaagggaacaatggacctttcaaagtcggtgcgaacagccttaaactttctggagagggatggggtgaggggataaaccccacagtaagccgattacagtgaaaggttgatggaatgtgctttgcagtccgggcttcagtgcgcgcgcgcttgtgcgtttggggtcatctttgtctccttacaattcccctgggttggtgggtcctccgccctccgccccctgcctctctgttagctgaggtaaggtgaggctttaaaatcgtgtacagcttcctttaaatctggggaatagccttagccctggaccctattcccagcttttctctgcagagttgggagatcctggtaaaggaggggggccctctctgtgaggacccagagtgctgctgttaatagcactagtggctacacccttagcgataaaaccaaggtcctgaattccctggatgctctctgctgagggttgatgagtgtcaccagacttcgacctggagcggaaacagctcacttgaattctccgcaggttaggaaaacagactttga

SEQ ID NO: 251 - DNA, 6000 bp, Homo sapiens; identical to SEQ ID NO: 17

SEQ ID NO: 252 - DNA, 6000 bp, Homo sapiens
aagtatcactcaaaatgttatcaatagactttagaccacacacagtagctcacgcctgtaatcccagcacgttgggaggccaaagctggaagattgcttgaagccagcagttcaagaccagccttggcaacatggcaagaccccccccatctctataaaaataggccaggcacagtggctcacagttgtaatgccagcagtttgggaggccaaggtgggtggatcacttgagtccaggagtctgagaccagcctgggcaacacagtgagaccctgtctctataaaaataggccaggcatgggccaggtgcagtggctagtgcctgtaatcccagcactttgggaggccgaggtgggcggatcacgaggtcaggagatcgagaccatcctggctaacatggtgaaaccccgtctctattaaaaaatataaaaaattagccaggcacggtggcgggcacctgtagtcccagctactggggaggctgaggcaggagaatggcatgaacccaggaggccgagcttgcagtgagccgagatagcgccactgcagtctggcctgggcaaaagagtgagactccatctctaaaaaaaaaaaaaaaaaaaaagattgcaatatatgataatcatttttaaagtatttgattaaacctgataggttttccggaaatggaaaaaaaaatccattttaaaaccaagctgatttttagaaaatttcaaaatgtaaatcagccctatccagaatataatttatttaaaactttatcttaaggagtcattttataatagtataactattaaaaaagtaactgttattttaatgttttgaaataaaacattttaaaatatgaatactgtagcttaaaagaaagaaactggagaaggaaaagtagagaaagaaatgccaattccagtccaaagttttatttgtcaagttttcttagaataacttttacctatttacgaattcttgtaaatagaatttataatggaaatactgaaagacttttgcctaaagtgtcattatcgaatactgctgtgatgttactgtaatgtaataagttattgttgcaaagtgctgtttttgacttaaaattttattttgtgtgtcttgaaaaccatagtattaaaggtatcgagattgtgcaagtgctgggcacacttggcatgggataatgtttttatttttacaaaattgtaatataactatgcaagtgtttattaaaagaacacaaactgaaaaggttatgggattaaaaaaagtaatgggattaaaaaagttatgagatgttctgcacggtggcccacgcctgtaatcccaacactttgggaggccgaggcgggcagatcaccaggtcaggagatcaacaccatcctggctaacacagtgaaacccgtctctgctaaaaatataaaaaattagccaggcatggtggcacacccctgtagtcccagctacttgggaggttcaggcaggagaactgctggaacccagaaggtggaggttgcagtgacccgatatcgcaccactgcactccagcctcggcaacagagtcagactccgtctcaaaaaaaaaaaaaaaaaaaaaaaaagttatgagattaaaaagttatgggatttttaaaaagttacattatgggataaaaaatgttatgaaaaaagactgaggaaaaaaattgtgggaaaaaagttgtggaaaaagttatgaaaaaaaattattccaaaaaaagttttatgaaaagctatgggattaaaaaaaaagtcatgtgataaaaattaaataaaagcaggccactgtcagcaaaacctggggaagtgtccaatgggggaaacaggtgcagatgagatgaagattactgtcatccaaaagcagggaactaggcccggcgtggtggctcgctcctgtaagcccagaattttgggaggccgaggtgagcggatcacctgaggtcaggagttcgaaaccagcctggccaacatggcaaaaccctgtctctactaaaaatacaaaaaattagctgggcatggtggtgcgtgcctgtagtcccagctactcaggaggctgaggcagcagaattgcttgaacccgggaggtggaggttgtagtgagcccagatgcaccattgcactccagcctgggtgacagagcaagactccatctcaaaaaaaaaaaaaaagttatggaaaaaacttaggaagaaaaagttatgggataaaaaaagtcatgggataaaaataaaaataaggctgggcgcggtggctcacgcctgtaagcccagcactttgggaggctgaggcaggtggatcacctgaggtcaggattcgagaccagcctggccaacatggagaaacctcatctctaccaaaactacaaaaattagctgggagtgctggcgcatgcctgtaactccagctgctccagagtctgaggcaggagaatcgcatgagcctgggaggcggaggttgcagttagccaagacagcaccactgcccttcagcctgggcaacagagtgagattccgggggggaaaagaaggagtgtaatgtaatgcctcactcatcttctttaagcagcagtgggagtaaatcccaccactttagggcaacctccatctcccactgcagccaagattcaatctaagggcgttagtgggaagaaaggctcagcataaaataccatatgagctctcaaagtccagtgtgagcatagcgtgttttttgttttttgcttaaccttgtattatacagcttttcaaacatagaaacgtagggagaagttcagcaaagtggcatgtgcctgtattccagctatctggggggctgaggtgggaggatcacttgagcccaggagctcaaagctgctgtgagctatgactatacctctgcactccaacctgggcaacagagcaacactccatctctaaataaagacgtagaatactaaaatgcaataaacccccatgtacccatcagctttaacaattaacaaatggccaatcattttttaatttttttatagacatgggggtcttactgtgttgcctaggctggtcttgaactcctgggctcaagcaatccacctgcctcggtctgggttcacaggcgtgagccaccgtgcctggcccaatctttttcctgaatgttcctacatctccccctgggttattttaaagcaaatcccaaacatattttagtttttttttttattttttaagagacagatcgggccaggcatggcggctcatgcctacaatcccagcattttgggagactgaggcgggaagatcacctgaggtcaggagttcaagaccagcctgaccaacatggagaaactctgtctctactaaaaatacaaaattagctgggtgcgtggcacatgcctgtaatcccagctactcaggaggctgcagcaggagaaacgcttgaacctgggaggtggaggttgcagtgagctgagatcgtgccattgcactccagcctgagcaacaagagcgaaactccatctcaaaaaaaaaagagacagaacatatcactgcactccagcctgggtgatagataaagccagaccttgtctcaaaaaaaaaaaaagaaaagaaaaaacaaacggtgtctcactctgttgcccaggctggggtgctgtagcatgatcgtagcgcactgcagcctcaaactcctgggctcaagtgatcctcctgcctcagcctcccaagtatcgagattaaaggtgcccaccaccatgcctggctattttttatgtgttgtagttgaccaatcttatctcaaactcctggcctcaagcaaccccccgaccccgacctggacctcccaaagtggtgggaattagagacatgaaccattactcctggccaaattatttcacctgtaaaaacttcagtatgtatctcaaagagataaggacttgtttttaacagaaatacaagcctgtatgacatagaaatacaaaaaataataataacatagaaatacaatacctggcccaacgttgtggctcacgcctgtaatcccagcactttgggaggccaaggcaggcggatcacttgaggtcaggagttcgagatcagcctggccaacataatgaaaccccgtctctaccaaaaatacaaaaattagccgggcatggtggcactcgcctgtaatcccagtctactcgggagactgaggcaggagaatctcttgaacctggggcggcaggggggttgtggcgcggagcttgcagtgagccgagctcctccactaggcaaaagggcgagactctgtcaggaaaaaaaagagaagaaaagaaatacaatacccgaaaagttttagtaattccttaaatcagttatctttgaattattatccaaaaaagatccacacattgaaacattttgttgatacatctcttaaatctcttttattctgaagtgttttcccctcccacatttcccactttgccatttttttgaagacgacagatcatttgtcccatataatttcctacattttggatatggttgatttcatacctttggtgtcttaacatattcctgctaatctctatatagcctataaactggtagttagatcttgaggcttgattaggttcaatttttggcaataggtgatgctctgtatttcctatgcatctcaccaggaaatgatatgatggtatgattgatcagagttgaggtattgttagctagcctgatgcattcattatgtctttttttttttttttttttttttttttgaggcaaggtctagctttgttgcccaggctggggtgcagtagcgcgatcgcagttcactgcaacctccgcctccctgactcgagcgattctcccacctcagcctctggagtgctgcgaccccaggcgccgccacctaattaatagacgcgttgcctccgtttttcaaatgtccctttcaggacgccgtccccttcctggtacgcgaagcgctgggagcgaaagggacttccgggagatctaggaagtcgcttctttttctggtagaaggcggggttctcctcgtacgctgcggagtctctgcggggtgtagaccggaatcctgctgacgggcagagtggatcagggagggagggtcgagacacggtggctgcaggtctgagacaaggctgctccgaggtagtagctctcttgcctggaggtggccattcattcctggagtgctgctgaggagcgagggcccatctggggtctctggaagtcggtgcccaggcctgaaggatagccccccttgcgcttccctgggctgcggccggccttctcagaacgaagggcgtccttccaccccgcggcgcaggtgaccgctgccatggcttttccccatcggccggacgcccctgagctgcctgacttctccatgctgaagaggctggctcgagaccagctcatctatctgctggagcaggtcagtgcttgcctgacgcctttatcgcatctacagtttagcactcattggatgcacatttcttccttgccgtgcccctttgatcttgttcttggcccctggtattgtccttggcgcttccccagcaggtccagaatgaatccagggagtagtaagagctgtttggaacctggccagagagttaatggaaatcaccccccaaccccgcatacaggcaagggagacaccattagtgccaggcatccctagggacggaaagatggttaagacatctttgccattagggatcttaccactccagtaggagctgtatgaagcacaaattatcacacacaggtggtaaatgagtgatagagctagtgtacccgaagagttcacagtaagtgatcatttctagttggggtgatgatctaggagcttcaaggaagtgagtgtgagtaataagcatattttctttggagactaagcatgctccaggcagatagattggtaggagcaaagttggcaaaccagggaaagacaaggcatgtaagggaagacacccatcagcagttacacagtagccactga

SEQ ID NO: 253 - DNA, 6000 bp, Homo sapiens; identical to SEQ ID NO: 15

SEQ ID NO: 254 - DNA, 6000 bp, Homo sapiens
taaacggttgatttttaatagcagaaaacacctaaatgtcaaaaaaaagtatccaagatatgaagggacatgaaaggtaaatttaccataaaaacatgtttcaaagtagtgattggagaaaaataaaccacttcatttataccccatggaattgagcctgctcagtaacagctaatctttataaagtccttactatgggtcagatactcttctaagtatttcacaaatagtcactcacctaaacctatgaagtaagcactattatcatcttcatcatctccaattttttttgagacggagtctcactcttttgcccaggctggagtgcagtggtgcaatctcaggctcactgcaatctctgtctcccgggttcaagcaattctcctgcctcagcctcccaagtagttgggattacagacactcaccaccacgcccagctaatttttgtatttttagtagagacggggtttccctgtgttggccaggctggtctcgaactccacacctcaagtgatccacccaccttggcctctcaaagtgctgggattacaggcatgagtcaccgcgcccggcttcatctccatttttacagaggaggaaactgaggcatagagaagttgagcaatttgcccaaggacataactagagctagcatttgagcccaggccatctgacgcccgagtcttaaaagatatgattgcaatgtaaggtttgctcaaggtacagaagaatattggttaaagtgttaaggctgacatttctgttctttccccactgttcctggttaaactcagtgcctggaggacaaagatagaggctttgtttcaaatgaggaattggattcaaatttccaaaatgaaaattttccaaatgatataaactttaaatgaaaacatgtaagatctgacggtttgatttaagctctgagcagggccgaggaataactaatgctcacctcttcctgcaaacactataaatttatgcactgagccaggcaccgcggctcatgcctgtaatcccagcactttgggaggctgaggcaggcgggtcacttgaggtcaaaaccagcctggccaacatggtgaaaccccatctctactaaaaatacagaaattagcagagtgtggtggcgtgcgcctgtagtcccagctactagggaggctgaggcaaaagaatcacttgaacccagaaggcagaggttgtagtaagctgagatcatgccactgcactccagcctgggtgaccgagcaagaccctgtctcaaaaaaaaaaaaaaattatgtgttgattggattcttaagcttttctaccagatcctgattgcattatgaggtctaggcccagatggatacttcataaatgtttttttgacaatgaatagaatgcttgtttagtcttctagacttgtcccacatatatcaaggataaaaatgtcttactttttttttgttttgagatggagtttcgttcttgttgcccaggctggagtgcaatggcgcaatctcggctcactgcaacctccgcctcccgggttcaagcgattctcctgtctcagcctcccgagtagctgggattacaggcacatgccaccatgcccggctaatttttgtatttttagtagagacggggtttcatcatattggtcaggctggtctcaaactcctgatgtcagatgatccgcctgccttggcctcccaaaatgctgggattacaggcgtgagccaccgtgctcagccaaaaatgtcttacatcttgattaccacttgtttattgattattgagacccgtaatgagtagcactcataggttctgacatctgtagtgggatgcgtctctggcatctaatagaaagtctgactcaaactgtctgaaatgcaaggaaagggcagagtttgtttaatgaaacaactcagtgacgtcatcaagaacccagttaaaaatttttttttctattttttgattctgccttatttagtgtgtaggctttgacctagggctggttttcctcttagtcacgaaatgactgtcagtggcaacaagcgtacttgcttccttgttcatccagcagggtagacagggaaaacctctttcaaaccatcaaatgttaaattctttccttcagtgtaattaggccacacattgattgactgagactctgggtagtgtggagcgggtggatgcctgaacagagttggggttctattagaagggcaaaaaagcaaatcgatgctggggaggttctcaagctgtttcttcatctggaaaatggtgagaatttcgcagagaattgagaggattagagataatgtgtcagatttagcaaataaaaatcgaagatgctcagttaaaattgaatttgagataaacagcaaataatattttagtctaagtatgctcacctctttctacaaacactacaaatttatacattaatttggttcttaagcttttctcccagatcctgattgcattacaaggtctagacctagaagggcatttcgtaatttttttggcaatggttagaaccttatttagttttctagccttgttccacatgtatccaggataaaaatacacatttatactaaaaattattcgttgtttatctgaaattcaaatttaacggggcatcttgtattttatctggcaaccctaaatctatgtgaagttcttggcacagagcaggtatccattcactggctagtattagtgttctttctacataagtgctcagttaaatggcagcatggtacttttttttttggagacagagtcttactctagcccaggctggagtgcagtggtaccatctcggttcactgcaaccttgacctcctgggttcaagcaattctcctgcctcagcctcctgagtaggtgggattacaggtgcacgccaccactcccggctaatttttttctatttttagtagagatggggtttcaccatgttggccaggctggtctcgaacttctgacctcaggtgatccacctgccttggcctcccaaagtgctgggattacaggcgtgagccactgctcccggcgcatggtactttttaaacttttactaactttctagaaaggttagtttttgaccaaaagacgaattaactaaactgcaagtgactgcaagaaatcctttaccactacttaaaaccagatcaaagcaaatgtccctaagcagaaggtcatatttgtgtatatgggatggcacattataaggcatctaatattactacttaatactaaattggacctatattaacagatgttcagttattgttttttctccatcttctcaatctatacggataattaatttgttacttccggttcaccaggtctaaataaaattttaaaaaattattcatttgagtcaaaggtaatgctgctgaaattcctagtacaaaggctctgatatacagggatgaaaatggagtgattgccccaggagttctggatccacgtgggtgaagctagaggtcacagcactgttactttgcatctggaggaggcaggagactctgcgaagccctctgttgttgcctctgactccattttccctctttgctaattcattgctcctacctgtaaaattttctaatatgcttccactttcatttcctcatcaaatattcaccgttatgaaaaagaaaatcctattggcttggtatcaagtggccaaactgagcatgctgctacatattgttaccagattcactacaggaatagattaagtggattttatcccaaatatctatttcctattacagtactgcatctttctaatttggtggcagctatgacctcatacactgcctattttccgtgcttttcctaaccagaagagaccctatttttctcctttgcttgttaaagcgaaaataattatgcagctttccatagatttgtccccaatgtctttttaaaaaaattttttttctttattttctaaaagtagcattggaaatgttatctccttcaatttcatcacctcttcatcctccttggaaacccgatccatggtgggtattaagatctttacatttgtactggttgggcgatgacttcattgctttcaagccagctgggggatcttgtgtggcagagcatcggaccgaagcggaggtgtgggtcgttgctgctgctgctgctgctactgctgcaacagctctttgcacgcgcccagctgctgtgtaaggaatcctcaggctgctaggtctttgcgcctaactcacccaagggaccgcaagctgctggatgagtgtacgtgtgagtgtgtgttgtgtgtgtgcatatgtgcgtgtgtgtgtgcacacgcagcggcaacagttgggcagcagcagcaatggacttcgatatcatttttaccaacaacagagataaaccatcctccatcctgtatttctcagctcccgccccgagtatgttctccccctcttctccgacttcccccaccccagcccccggcacgggtccctccggagggagggcagggtagctgcgctgcaggcaggattccctcttttttccgcagtgacaggcggattccggggcctcctcgccacctcctacccccgcagccacccctttctcagtcacgatctccccaccccaccaccgtcgaccctctccctgcttccccgctctaccccccggcgtcgactccaggctcgggccccgcccctctcagcctctccagcccaggttgctagggcttggcggggcaaccaaacctggcgtgccaggaggcgcggcgcgcgcgtgagcgcgcaggcgagcttgtataaggaaccagcgttcttcggcttcggagactcgagcacgagcggcgcgagcccgaaccccaggacaagcgcttcctcctcattggctcctaccagaagggggcggggtaaaggcgggatcgggcaaaacctgaggtgctttcccattggtccgaacgggccggctggggcggggcagttagcaaaataggctgcgcgttcgcttctgctagagggcggggccggaggtttcgattagttgtctctgccgctggggaaggtaaagcggcgacggcgtcctcaggagctgtggggtcccctgctagaagtgggggactcggcggggtgagtagtcgcgccgccacccgcccgccaagccttcttacccttacatcggccccgcgtccacccagcttctcctgagagtggagacccacccagtccccccgggcggacaagagaaggggcgggggcgccggttcccccggaacggggcgacgcggtgaggacgtcccagcccggagtagcccctcctcagcgctcccctgcgcctctggaagggcttcccccgaggggctggggctgtcttttggggtgtggggaggcgaaagggtgtgaaagaggggcggcgggtcgagcccgccccgcggggttcccctcagcggcgggtctgcggcgtccccgccccgccgctcccgcggcacgagctccccggggcttgcggcgaggtaagccccttcccgccggcgccgaggaggggcctgcgcgccccagccccctgcccgagttcggagggagcccgagactcgccaggggccgtcagtcgcggcccgggcccttctgaccttggctgcccgcgagggtgggctagcgaccgggcgccggccccgcggctccgcaacctcccccggacaagtttcaggcgatgctgtgaagttcacgactggcatagtgcggggaagaagaatggccccttctcagaccttcataccttttggaccctcatagaaatcggattctgggatttggaaccgtctcccagaacgaacaggtcctccttgcattgacacgttttgtgcccacgttggggaaaaaaataacctgaacatatttcagtgtaaaggcagatcttccttgagggttttgtttttcgcttcatttgagtgttaaagaacagatgcctgaataagaaaagcctgaccttagtatctctacagtgagattagacgggtg

SEQ ID NO: 255 - DNA, 6000 bp, Homo sapiens; identical to SEQ ID NO: 31

SEQ ID NO: 256 - DNA, 6000 bp, Homo sapiens; identical to SEQ ID NO: 29

SEQ ID NO: 257 - DNA, 6000 bp, Homo sapiens
tcctggctaacatggtgaaaccctgtttctactaaaaaaaatacaaaaaattagccgggtgtggtggtgggcgcctgtagtcccagctactcgggaggctgaggcagaagaatggcataaactcgggaggcagagcttgcagtgagccaggacagcaccactgcactccagcctgggcgacagagagagactctgtctcacacacacacaaaaaattataatagaggccgggggtggtggctcatgcctataatcccatctctttgggaggccaaggtgggtggatcacctgaggtcaggagttggagaccagcctggccagcaaggtgaaaccccatctctactaaaaatacaaaaattagcctgttgtggtggcgcgtatctgtaatcccagctactcaggaggttgaggctggagaatcacttgaacctgggaggcagaggttgcagtgggccaagatcacgccactgcactccagcctgggtgacagagagagactctatctcaaaataaaaaattaaataaataaataaaataaaaatattattatttttatatgcccagctaaatttttgtatttttagtagagacagggtttcaccatgttggccaggctggtctcaaacttgggacctcaggtgatccacctgcctcagcctcccaaagtgctgggattacaggcgtgacccactgctcttggcctcagtaagtgtttgttggatgattgacggttgaactcagaaaaagggtgccagggagggccatgacagccatagacctgcgagtcttccttttatggtgggcataaaggagaacaggacatggtttctatatgcagacatcacagtgaagaacctaccagggaaccctcaaattgatcagggatacgtaattaaaaaaattttttaaaagctctgttttattttgttttatttagtaagtgtgtgtgtgtgtgtatatatatatatatatatatatatatatatatatattttttttttttttttttttttttttttgagacagagtctcactctgtcgcccaggctggagtacagtggtgcgatctcagctcactgcaagctccacctcctgggttctcgccattctgctgcctcagcctcctgagtagctgggactacaggcgcccaccaccatgcccagctaattttttttatgttttattttttagtagagatggggtttcaccatgttagccaggatggtcttgatctcctgacctcgtgatccgcccgcctcggcctcccaaagtgctgggattacaggcgtgagccaccgcgcccggccgagaatattctttcttcatacatccagacttatttcttaaaatgtttactataaaagttttcacacacacacaaaagtagacagaatggtggaacgaactgtttttctttgctgcagtagatttaaaagcaaatgcccagtcactacagatatcaatatgcatcactggaaaacaactgacagcattttaaaaacataattactggtggaactagagaggatgttaagcttaacttagagaatgtaaataacggtcagggatgaatgggtatttttccacttagatatgttagtggtcaagttcctcaggacaatgttatgtttttttccatgccgtggtggggtgaatgcacagagactttgtaagatttcctggcattaagatgatctaagggccgggtgtggtggctcacacctataatcccagcactttgggaggctgaggggggtggatcagaaggtcaggagattgagaccatcctggctaacacggtgaaactccgtctctactaaaaatacaaaaaaattagccgggcatggtggcatgtgcctgtagtcccagccacttgggaagccgaggcaggataattgcttgaacctgggtggtggaggttgcagtgagccgaggttgcaccattgcactccaggctgggtgacagaacgagactccgtctcggaaaaaaaaaaaaaaaaaaaaaaaagatgatctatggaggagaatgcccatctgagtggtagaagagcccctgaggctaggtgagggtggactcaattaaatccagtaatatttccatgtcacttgggagttcctggttgcaagccacagaaatggctctgagtgatgggcaagaccaaaggggtcaaaatttcacccggagtggctggttagcaagagttctcaattcttttcttctccttcttctcctcctccttcttcataccttcacttgcctttattattttttcttctttttgaaggctgagcacggtggctcctgcttgtaatcccgatgctttgggaggcccaggcaggagggtcgcttgagctcaggagtttgagaccgcctgggccacatggcaaaaccccatccgtataaaaaatacaaaattagccgggcgtcatggtgtgcacctgtaatgccagctacttgggaggctgaggtgggaggattgcttgagccttggaggtagagggtgcaatgagctgtgatcatgccactgcacagtctgaatgacagagggagaccctgtctcaaaaaactaaaaataaataaagaaataaactgttagcatgttgccagcttttgaaagtcattgtgctagccatgtagtgttatcttactgtggtttcaatttgcatttccctaatgattatgattgagagtttttaatgtcactctggcctggaatgcggttgagtgatttgtagaatagactggattttttttaatgccaaataaaggaactattcattcattatcttggaatgattagaaaagccatgaaacctgccaaggattttgcccagggcggggaaaacccacctccggagaaaggctagagctaccctatcattgccctgtggagtttgtttgttccgtgaaatggcgacacccttcgcactcctctttccctccacacccgctccaccctgccacacttttgctcccagatggcgtgcccctcatttttcacctgtagaattcctctttaagtgaatgtcacatccttttgaagcatctaggggccaggcatggtggcttacatctgtaatcccagcacttcgggaggctgaggtgggaggatcccttgaggccaggagttggggattagcttgggcaatgtagcaagatcctgtctatacaaaaaatgaaaaaaaaaattagctgggcatggtggtgtgcacctgtagtcctaactactcagcaggctgaggcaggaggattgcttgagtcccagcattcgaggctgcaatgagctatgattgcaccactgcactccagcatgggcaacagagtgaaacctcgtctgcaaaatgcatgcatgcatgcatgaatgaatgaatgaataaataaataaataatagggctgggcatggtggctcacacctgtaatcccagcactttgggaggctgaggcaggcggatcatttgaggtcaggagttcaagaccagcctggacaacatggtgaaactctatctctactaaaaacaaaaaaaaattagctgggggtggtggcgggcccctgtagacccagctactcgggcggctgaggcaagagaattgcttgaacccaggaggtggagtttgcagtgagctgagattgtgccactgcactccagcctgggtgggcgacagagcgaaactccatctcaaaaaataaaaaataaaaaagcatccaagatttccagaagcttccagacatagcttgcaaaatgatgttgtggaaaaagcgcagcctcatttggatgagctccttactacctgtgtggctttgggcaagtaattgctttaagcctcattttccccaagtgtaaaatggggataaaataatacctcagaggtagctattagagatatcgtcattgtcgtcttgttttgattccccccccccccccgagatggagtcttgctctgtcgcccaggctggagtgcagtggcgtgatctcggctcactgcaacctttgcctcccaggtttaagcaattctgctacttcagcctccagagtagctgggattacaggcgtgcgccactaagcccagctaatttttgtatttttagtagagacggggtttcaccatgttggccaggctggtctcgaactcctgacctcgtgatccgcctgcctcggcctcccaaagtgttgggattacaggcgttagccaccgcacccggccttgttttgatgattaatctgcctctattacaggcttatttggctgtaccctggccgcttctttccttatccctctccctagctgctcgccataaagagcaggctgtactacttatgtccgctgtgtccgtccatgacacagagttggcaaataccagaccctcagcacatttgttgaaatggatgaatctcaaaggattctctgggaatctggtggctagagaggggtcgggaccgcgagggactctcgcgctcagcaaggcgaggagctgctttcctggagtatggaaactgagtcagcgcctccctccctcataaccaagggcctgcgggactgtctgaacacgtgggtttgacaggtcagaaaaagggagaaccaagagagtggatgctcagaaaacatgaatgggaaagacagactgagaaggaggaaagtgggatggagagggccagctgagacgtgggccaggagccggagcggagatgaagggtgaggaccggggcgggggacgagctgcgaggagggttttgggccctggggactgcgtggtagcagcggaggcgggtacaatgctccgacgcagaaggaagagcgtcgaggctccgggtgggacctgagaaggcacccggcgtgcggcggcgctgggttggaaccgccgactccgcgggtcttcggcggcgggcgctgcaggtgcaggaggcggagccacgcgggggcggggcctgtcggggcggggccgacgagggccgggggcggggcgcgccgcttgtctcctgcgagagccgcgggggccgcggagctggagccggagctgaagccggagccgggttggagtctgggcgggggccgggccggagcgggctccagagacatggggtcgaccgactccaagctgaacttccggaaggcggtgatccagctcaccaccaagacgcaggtgcgccacgggggccccggcgtccccatccacctgccgggctgggggctgggcagggccgggggtacgcgaacttggctcgtcgggagatggggggacgggcgggccccgagcgtaacgccaaggccagcgccggaacgggaccccgcggcctgtacctggaagctccatcccctggccctagtcccccaccctcagcctcctctcctgggaacacccctctccccgaagccgctgctgccaccttaggctgacgtgtgcctactccccgagccggcgacacagctgtccgccccctgtcccgccccgcggcgtccccagcttcgcatctccagcctcccgccgcccccacccacccatccaccgtccgctcccctccctgcccctcattgcccgcgggtcccggacgcacagtccctgttgactcaatgcaaacaaagcctggctggcgtccgcccgggtcggagaaacagctggtgtgcgcggcagcggcctcgctgggccctggtcgatgcccgtgggcagggaaggcccaggtcttcctgggaacacgcaaagagtggcgggcagcgaggcagcctggtggggggccctgtccccaggcctactgagcacagcctcccagctggggacctctccaggggccttccccgaggccctgcaagggaaaggctgttagcctgtgtgctctgttctctggctcagggatggggacccgcaggatggccctcagtcagctggtgaggggcctaaggaccctccagcctagtccatgctcataactctcctgtgagtccacaagtggcccaatagccacctccttataccacctggccccagcaagactgcttctctg

SEQ ID NO: 258 - DNA, 6000 bp, Homo sapiens
gcatgtgagatcctatcgaaggctgaatacacaaacaccacctgccaccccactgaccttcctagtttctgaagtccttgatcacagcagggaaactccattttgttcaacaaaccttagctatttaagaacacaccctctttgtacttgtaggtggtaaggcagggggagtaggttgtaaatggaataaaatgaagtcttagcccttggggattttatcatcgagaaaagtagaacactgtgctagtaagatcaacaatttttgagcatctgctctgcaccaggcactgtgttaggcacttggcatgtgtgatttaagggcaattcaaggtccaaagtgtgatgagagctcagagagatttcagaagtttcctgaagaagtgacattggaactgacacttgaggaatagtatgattttaacaggttgaattggtgaaagcaatggaaggagccaggatttttttttttttctcgagatggagttctcctcttgttgcccaggctggagttcaatggcatgatctcaggtcattgcaacctccccctcccttgttcaagccattctcctgcctcagcctcccgaatagctgggattaccggcccccgccaccatgcccggctaatttttgtatttttagtagagacagggtttcaccatgttggccagactggtctcaaactcctgacctcaggcgatccacccaccttgggctcccaaagtgccgagattacaggtgtgagccacaccaggccagaagcaagaatctattcttcaaagcccaagaggcaaggaacgggggctgcactgcaggaactgggaatatcccttttggctctgcatcccttgttttctaaaatgaaacacttgcaggaacctcccatttgatcttactgcctcctctctctttctggtgtatcctaaaaggactgtcagatccaccttcatgaaaccaacatctgaccaaatcacaactctaccaagaaggaagacaggaagacagaaaagcaggaggtagtgacagaatgaagagggaagctttcaacattatcttacagaataatgtccaaactccttattccaagcctctaactggcagtgccagttggtgtatttttagcttcatctcctgccactccaaccccacagtgcctctgcttcctacattccagggatccctcagagcaggtactttattcttccgcgcctttatttctgcttttccttctgcctgaaatggcctgcactccgtcaaaatcagattaagattttaaacttcagtttaagtgaactttccctaagacatccctaaccactcattcaaaattaagccttctctctcctgtggtcccacaggacttcctgcctctatcctagcacttgtcaccctggagtcagaagacctgggtcaaactccagctctgccatataaaagctgaatgaattgggggggatttctactgatacctctgaggctgtttccctttttcttcttcttcttctttttttttttttttttttttttgagatggagtcttgctctgttgccaggctggagtgcagtggcacgatcttggctcactgcaacctctgcctcctgagttgaagtgattctcatgcctcagcctcccgagtagttgggattattggcatgtgccaccacacccagctagtttttgtatttttagtagagatggcatttcaccatattggccaggatggtctcaatctcctgacctcatgatctgccagtctcggccttccaaaatgctggaattacaggtgtgagccaccgcgcctggcctgtttcctcttttgtaaaaatgggatacttaagatttaccttgtcgtatacaataagataatgtatgcaaaactcttacacatgtaacatatttacattttaaatatgtaaacggttaaaagtttctactccactaaaatgtaaggtcccagggaataggaattttaaaatgaaaaattttccttttaaaataatacttacaggctgggtgtggtggttcccgcctgtaatcccagcacatcgggtggctgaggcaggcagatcacttgaggacaggagttcgagaccagcctggacaaaatggcaaaaccccatctctacaaaaacacaaaaaatttgccaagcatggtggcacacgcctgtcatcctagctactcgggaggctgaggcaggagaattgttatgggaggtggaggatgcagtgagccgagattgtgccactgctctccagcctgggtgacagagcgagactttgtctcaaaaaaaataaaaataaatacacaaataaaaattaaaaataaactcttacagaatagttgcaaaggtatacagagaattcccatatattcttcacccaatttcccctactgttaacatcttaaataaccatggtacatttatcaacaataagaaattaacattgataaaatactattagctaaactgcagactttattctcattcttacaacagtttttcaactcatggcccttttctgtttcaggatccaatccagaatcccatactgcatttagttgtcatcttcttagtctctacaatctgtgacagttcctcagtctttccttgtcttttatgatcttgacatttttgaggagcactggttattttgtagaagtagaaaaaccctccatatgaatttttctgatgttttctcatgattagattgaggttacaggtttgggaagcataccacagagctaatgtgcccttctccacatcaggggttccatcataacaacatggcttattactggtgataaaagaggggttttttgtttgtttgtttgtttttaccgattctcactctgttgcccaggctgaagtgcggtggtgtgatcttggctcactgcaatctctgcctcctgggttctagtgattctcctgcttcaccctcccaagtagctggagttacatgcaggcaccatcacgcctggctaatttttgtttgtttgttttgagacagagtttcgctctgtagcccaggctggagtgctgtggtgcgatctcagctcaccacaacctctgcctcctaggtcccggttcaagaaattctcctgcctcagcctcccgagtagctgggattacaggaacgcaccaccatgcccagctaatttttgtatttttagtagagacagggtttcaccatgttggccaggcgggtcttgaactgctgacctcaggtgatcgcccgccttggcctcccaaagtgctgggattacaggcgtgactcaccacacccggcctaatttttgtatttttagtagagatggagtttcaccatgttggccaggctggtctcgaactcctgacctcaagtgatccacccacctcggcctcccaaagtgctgggattacaggcgtgagtcaccacgcccggcccatctttgcttaaattataaactcagtttctcccacagttagttcagcctatgctcaggaatgtacaaggacagcttggaggttaaaagtaagatggagttggttaagttagatctctttcactgtctcagtcatcattttgcgaaggcaaattcacaagtgggaagaaaggacgggtagatgcagggcagagagagggctctgtgcttcgagcctggatgatacagatttggcaatactattctaaggagagaccagagaaagaagtttagggtagaaggtaattaattagagtatgttgaatttgtcttgcagaaaaaccctgtgaaggaaacctctgggaggctgttgtaaatgctgggctggggatggggtgggtctagagatccagatttgaagcaatttctagtctattgatagctgaagctcaagaagagagttagatgagcagaggtgaagagagaagaggacatcagactcttgagtaaattcagcttaagctcagggaggagtaagaaagggagacagtgaaggaagcagataaggaatattgggaagctggacaaacaagaactgggtagttgacaataccaatgaagagggaagaggagaggactttaattctttcggagatgccagatgagaaaaaattaagaaatgagtgagaaaaaaatgatggagtgattaaacatctatgttgctttcctttgagaatgttaactatgaaaagaagaaaagggtggtggtggctgcaaaccataggaaggctgagaaagggttttactttggttctgcctctaatccctgacgcattcaacctcctcaagccatttgcttgtaaacataactggcataaataatatctgatatgcccattttacaggacaagtgcttccctctcagaccacatactcgaggacagcggccgtccacgccttatttacattcatcttcccaacacaacagtcatttggaagatgccgagtggcgtgggaagaacaagcgggaacgagcgccgacccgcccgcggcctgactgctagcgcaccgctgtgcggccgcctcaccgcgcactccctcctgaattattcaccaccgagacgaggacggtgatcgcccccattccacagaggacacggagtgaaggcgcagtcacaggcccaaagcccccagtcggcgggtcttggaaatggacgactttttcactcaaaagctacgaggcaacaaagcatgtggatgaggagggaagggagccggggccaataattcatctcaaagtaaaagacgtccccgggggtggggaacaaacaaacaacaaaacccggctctgtgcttccgcgcttgcgctctcctaggtctgccaggctgccgcccgcgcctaggccagagtctcagtgcgcctgcgccgagcccgacttccgccagggctcgattggcttccaggctacttctcccggcccagggagggcctgcgctgtggctagagaagggagtctggtgactgggtgcgcgtgctgatgacgaaatcggaagtgcccggagcagaggcgggaccagaacctagagggcctcgggattgcggaagtttggtggggagggtcggagctctggtggagagagtgttgtctaaaacaagttccggaagggaggctgcccttcgcggtccgagaaccaccggcctccccagtttgagggctgttaccccgtgcgcgcttcgacgttgctgctgttggctctcctcgcccctcgttcccttgggaaccgcctgggaactccgccatgtcatccacttcgcccaacctccaggtatcattgctcatctcccgtccccctagggagctgggatcgaggggaggcgcgagaagcgggtggggggcggggagaagggaggaagcggccgcgcctgtggtcgaggcgcaggagggcgggtccggggacctgcagcaggtgggagaggggcccgttttccaacggaaaggtcgtttctggcccgctcttggggtctcccgagctactggctttgtgagactcttcacttttgttgacacttcccgcttccaaaccagccaagatctgggcaggtttctccaatcagggttaacggagaaagaaagaacgtaatttttgcaaagccctattctggaccagttgaagatagggtggtcatagttcggtcttagtttctcaagctgacagcagaccccttcattctgagctgtcaggtgagtagagatatgggaacagaccaagaatctgagattacagccagcctgcatgcaatctccgtgaagtcattgaatttatgtgcacactcctgtggctcccagatggtagtgtgtaagatcgaggagtattcttaaacctctgtgtggctccacttcccctcctctaccgcaatgagcacagtgttttgtacacaaatcatggaatcttaagattttaggcttaatcgttagtcctctgtggaatggaattcgttcagaaaagaaatttcttaatgtaatggtgtctcccatccccagaatggatctagggcttcagtggcgtttagaatgtaatgtggcttaatgtagaggac

SEQ ID NO: 259 - DNA, 6000 bp, Homo sapiens
cagcctgaggaaatggagccgtagattctgtttaaaattctctcctttcattttttcattttctccatctacatctctgtctgctccctttctcattcattgctttctgcttccttccccctttctccattcattcctcttccttctttgcctctatccgtctttctgcttttctttctgcctttctgtctttcccttctcaccctctctctcctgcttcctctcctctcactttcctttccctcagtctctctcttgctcttgctctttctctctcttccttttatctacagcctattggcttctcatttcttttccttctcccctcccattttctttctaagaatttcttgatgaaactaaaagaggactaaaaggagctccatgaaatgcttgcctggaagaaaacatggctggatgctcttctgatcataggcagccactaaatttgatttgtagctgatcttaaatgtaggaaaagattttcaattacaaaactcataaagtgtaaagatgagggaaactggccatgctttgagtttgactaatggtctcaaagcgctttaaaatgtttggcatttgccagcctttctttcttctcctaatcctcaaactcatgagtttttatgggaaacataatcctcttttctgattcatttacacttagctcatctgagtattgttttgtaaaaaccatctgaagtccaagaagttttatgagatctttaaaggcttgttttttgaaccaggaagttgtgtactgccaacataaatggaccttgaactctaggggggtttgagtccagcatccatagcattaaactgggtctagaattggcaaaggcccatcctcatggctgacagaaactgggctttcaccttcagaataatagtgagttcagtgtttgggatgagtgaccatctcagatgatagtacatggggtgcataacaggtttttcaaggattatcttgctagttacgtaaatagcaagagacttatgtggaaacctgtgattttgctggagtctcccaactacagagtcgggctgcttgctcatgtgtatatttccatattaattgtgtgcatacacacatacactaatgtgtagacggatgggttaacattcacactagagatttatttttgtatttaaaaaattttttttagttttagtcttattatttttttgagatggagtctcgctttgttgccaggctggagtacagtgacacaatcttggctcactgcaacttccacctgcagggttcaagtgattctcctgctttagcctccggagtagctgggattacaggcatgtgctaccatgcccggctaattttcgtatttttagtagagacgaggtttcaccatgttggccaggctgttctcaaactcctgacctcaagtaaactgcctgccttggcctcccgaagtgctgggattacaggtgtgagccactgcacctggcctatttttatttttttcagagttggggtttcaccatgttgcccaggctggtctcaaactcctgacctcaagtaatctgcctgccttggcctcccaaagtgctgggattacaggtgtgagccatggtgcccagcctcacactagaggtttttttttttttttgtttttttttttgtttttttcctgtggttttgtttcagagatgatctgattgtgatatatccaaatctgtcataaggcaggttgtaattgggttaaagattggtgtgaaatgcccacctcgccattgctgtgggttgagaggaaaactgcattctgcattttttaatggttaaaaaacatttttctgcagagccaaagggcctggttaaggtcatttctcccccaaacactaggatctcaggcagagtcccaggccttctggaaactgaggctcagagaggtgaaatgtcttgctcaagtttccacgggaagttgatatggtttggctgcgtcccttcccaaatctcgtcttggattgtaatccacgtgtcgtgggagggagccggtgggaggtaattaaatcacgggggcggttaccctcatgctgttctcctgatagtgagctctcaggagatcagatggttttttaaggggctttcccctcttttgcttcggcacttctccttgctgccgccatgtgaagaaggacgtgtttgccttccccttctgccatgattgtaagtttcctgaggcctccccagccctgcggaactgtgagtcaattaaacttctttcctttagaaattaaccagtctcgggtacgtattagcagcatgagaacatactaatacagaagtaaagcagcaggtagagcccagccccctagagtccccatccaggctgtgccctccacaggtagctgccacttattgcccaaaagcagctttaatgcttgccatctgtccatctggggactgggagtgaccaccactgaagacaggtagaggctggtcctgttggggatgctgtcctttactctttcctgagctttcctctgtctgacatctctcctctcctgtcctggctctgcagaatgttgtagctatgctaatcaccctcctccccacctccaaccatttcatctgctgttacattatccctacctgagaggtaagagctctgtgaactgatctgagttgcaggtaggaagtattttccctacatgttggtgaattttccataagatgacaaagaattgtgggctgtactatgatacaggcatcatacaaatcaggtcctcccttgtgagaggtctatcatgatctcaaagtgttgcttcattaagttgttatcatttttaagctttcatttacatcttctctccctaacaagacacgaagtttcttaaagacaagggctttatgccttgtgatcctttgtatttccacagcctcagtgcctccttcagagatgcggtggatattagcttctgttgtatccttcatacagaacctggtgctgagagacagcttcttctttttttttttttctttaaacttttcttaagactagtcaagtacagtatcaagaagacgggaaagagtagaacaaggaattggatccgtaactgactgtgaacaatcaattgaggtaactcattacctttgaaccaacctgggaggcagccttgtgactcacctcaatcctcaatcttctcagctagttcactttggcctggctcaggggctgacctagaatgatcctgtccagaaggaccctggatgttcttagagacacagactgctagggctggcagggacttttcatccaattcctctgtgacagaggaggaagtggaggtgcagaaggagaggtgagctgcctgtggtccttcagcttactaatggcagtgttaggactggacctgagggctcttccctccagtccggcgctatttattccatgacagtgcctctcaaactgtgttctcacaagcagctagtgctcaggcagctggactgaggccctgcctgccaaatcaaatattggaggtctttctccaatgtgcagaaaaaaaaagtaattaatgggttaagtttccttagggttaaattatttttccattaatgcttcttaaaccattgtcacctgctaccaattgtctactagccaatgcatgcaggcaacaaaacaaaaggataagccacaagtaaataagaacaagaacaaccaaagccttggaaacacaccatcattcttaagttaaaggcttaaaaaaaaaatagaggaagactgctatgactgtggactttctattgcattcacataataaaatcatgcgacattgttttgaattcaaatgctaaaagtaaatatgtcattatttcatggttttccccaaagagcactatgaccccccagactctatccctggtacattctgccatctctcttaatgggtcaggtcatctccaagttgggtgacccggtcggattacggtcccgtgaactgattcgcctttattaaaaacaataatggcttagggttttcagggatcctgaactctagtcctaccctaaaggcccagggacagggctgtctctgcggttgtccctgggcggttctccccgtcccacgcgggcgccctctgctgcccgccctgcactcccatccctgccaagcgagaagtagggtaccagaggctgcacaccgagaagcagccacggggactttacagccccacagggagccacctaaacggtttccgatggagacctcagcgcgccccgacagccctttctggggcccgatttggtatctgaattcaaccccgcagcaagtatcacagcaaacacggataagaaaatgccggggcttccaaacaatatcaaacgcatggggcttctgaaaggacaggatcgttcagtaactttgctgagcgctttgtcctctcccgggacacgggaccggggcgtggggacctccgcctcggcgacccacgggggcaaccccagtggatgtggagggtggcggcgcgccttcgggctcctcgcacgccttccccaattaggatctgccgcctgacgtcacgtctgccggagattggctgctcaggtctgacactcggggccacgggagagaaacttttaaaagacttcgccgccggggctgcctcggagtgtcccgcgcgctctcgctcgctctcggccaccctcgccgggccccgctgcggcgcgcgctgcaacccccggccggacgcgcggaccctcaccttgcgcggcccgctcccctcgcccctccccgctccccgggctccgcgctccccacccccacgccctcctcctgctcccagccacaatcggccggggtctggggccgctcagctgcccgcagagcctcctccctcgccaccgacttggtctcctcccgcctttcccgggctctcggcagctctcgggggagcccgaacgcgcggggaaaggcgagccgcacggccgggggagggggccggaccgcgcgcgaccggtcgcgcccgctggggcccgcgatggcgggggcctggctcaggtgggggctcctgctctgggcagggctcctcgcgtcctcggcgcacggccggctgcggaggatcacctacgtggtgcacccgggccccggcctggcagccggcgccttgcccctgagcgggcccccgcgttcgcggacattcaacgtcgcgctcaacgccaggtacagccgcagctcggcggctgccggcgcccccagccgtgcctcccccggggtcccctcggagaggacccggcgcacgagcaagccgggcggcgcggccctgcaggggctcagaccgccgccgccgccgccgccggagcctgcgcgtcccgcggtccccggcgggcagctccaccccaatcccggcggccacccggcagccgccccgttcaccaaacaaggcaggcaagttgtgcgctccaaggtgccgcaggagacccagagcggcggaggctctaggctgcaggttcaccagaagcagcagctgcaggggtaagcccacacccccttccgcccgcccgcccgcctcgcgcgcaccgcccgcggagggacctgcggggtcagggccactcggagccccgcggtggccagggcggtcgcgcgcggtgggtcggctttctcctcccgcctccgcctgctctgggcgccgcgggaagaggggagtgcggggaagcccaggaacttttactgacgtgaaactccgagtgcattgttaccgagctgcgggtaaacacaaaaggcatttctgcctggggcgtaaccttctgcgcgcaaacccaactgcttctagaagatgggcgtaaacttgaggtcactacagtttaatccctcagcatcaattaaactctgcaactgagttttaattttggtctagctaatgaaaaaaatgtttcgagggcgggctagccgtaaagatccagctcctgttctgtggcctggaactttgcagcatcagagaaatcatgggcttggacttcgctgcacctgtggggtctgctt

SEQ ID NO: 260 - DNA, 6000 bp, Homo sapiens
gcatgatggcatgtgcctgaggtcccagctactctgaaggctgaggcagaaggatcgctggagcccaggaggttgaggctgcagtgagctgtgaaactgccactgcactccagcctgggcaatagagtgagaccctgtctccagaaaagcgaaacaaaacaaaactctcagtttacacttcattcaagagtgtcaagccagggcggtacataaaataacaaaggagaatccttcaccaaaggaggataaacagatcctggttggtatatttcctaatagaacttccatgtaatgtgtgtctttcagtaccgacaacattaacacttcattatcatctttttctgatgcagactttttttttttttttttttttttttagattgagttttgttcttgttgcccaggctggagtgcaatggcaccatctcggctcatcgcaacctccaccttctgggttcaagcgattctgctacctcagtctcccaagtagataggattacagacatgcaccaccacacctggctaattttgtatttttagtagagatggggtttctccatgttggtcaggctggtctcgaactcccgacttcaggtgatccacctgcctcagcctcccaaagtgctgggattacaggcgtgagcgcttggcctctgatgcagaattaacaaatgattcttaaacaccgtcaattgcatagctagaaatgcctaatttgtttaaactcctttttcacatgtgtttggaaagtatagttttgcaactgatgccaaataatctttgcttagaatatcatgatcacttgaatatgagttcacaaaaaaaaggccaaaaattgtgtggcaatcagaaagtaagactatgatgagaaaataaggctgataagtgtacaataggtgtaaaaatgccaacatcagtacacagagtgacagttctgtggccagccatgacacaagtccctgtcataggtccctgggggcagctccggtgcgctctaagagctataaagattaatatattttaaacatgacacgtaggccttattactactcacagtgtgacatgaaatcagatgacccctcacactgttcttttatttaacttttttgttattaacaatcattgttcttaaatagtagaattaaagttctgttcaaaagtgtccttaaagggctttaagcaaatgtttaaaataaaattcttaacccctttactgatttgttgaatctgaaaatacctgcatgtagatatataatcaacctggaacagtaggagtctttcatttctcacttgctgactatactgagataaactaaaacagcaaacaattgatgttgaaatgtcaaggctaaaatgtcacggcaacagcaagtttaataaagttgcatctcttcaagaggctaatgatagtcatcgatgtgcctttaaggatgtggaggtgactttacttacagagcttcatggctgcaatcttaacatctcctgtcacagtccttgagtccatcctcatgcccacacagtaaagtgagttttcatttcattcttgaattcacacaggtaagtgggcgggtatgtgctcaaattcagagatgcattatcacattaatccaagtccattaatctcattgctccaattttttttcttattccctctgaactaaataattctttacctactgccctttattgcttgataataactcaaaaaaaaaaaaacaaaaaaaaaaacccagagtcaagaaccaagctactacttggccgatgactattcatttacttcatgcttcaatatccctctttgtaaaatgagaattataatatctagcccaactccacagatagccagtataagaaaaataccatctgtgagaacacttaaaatgctttggaagaaaggcataagaatattataacattattattattataattattgagatggagtttcactcttgttgcccaggctggagggcaatggcgcgatctcggctcactgcaacctctgcctcctgggttcaagcgattctcccgcctcagcctcccgagtagctggacttacaggtgcctgccaccatgcctggctaatttttttttgtatttttagtagagacggggtttcactgtgttggccaggctggtctcaaactgctgacctcatgatctgcccgcctaggcctcccaaagtgctgaggttacaggtgtgagccaccgtgcccgaccaagaatattataactttaaatagcagatggcacaaaataaaattaatacagcaaggaaataatagaagaaatcagctctcttgggcattgttgttactggcttttctcatttctctctttgccatctaacctcaaaatatcttgcagctccgtagtgactgaagtttgtgtgcatgctgccaaatgctgtaacattctctaggactcaatgttacagggaaacacacagggatgtaattcactactgagaaacagacttcatttctctgtctgcctccctctctgtctataaactctgatatttgatgtcagcacaaggcctcatttgttttggtccaaatatccagatatgtgggcagactcattttaccaaggaatgtcatcaaagttcacaactgctgattccatagcatgaggcatttgaccattggcctctccccaaagtagtgggaaatgaagcacttttcctacctgaagataaattgcttccactccatgaaaatgtattcagcacgaacaatgtagaaagcactcccctgggtactgtcgagaatgcaaaaatgaataagtcagttcttgcacttgataagaactttacaggcccacattctcagatataggtctcagtcagattaagttctcctccacaacagaagctgtggtgtccatctccccaccaggaggtctcagtgctgtaggttgactcaatgaataaacaggaaaatgggtgttctagtgaaaatgtttcctattcttgtgttcaaccacaataaaccatgtctggcctcttcatagtctgatcccaattgcttgaataagagggaaagaagaatccatcatagaaatagtttagaccacgaggtagacaaatggaaagtgaagaggaagggattggaagaagggaaaggaaaagcactgcctagaaggaatcagtgaaaacaaaatttctgcagaaaacttaggaataattcagttgattatcaataataataataaaatagacaatatcctttgggaggagaaaaacagaatttggtaaaaattgaattagtcaaaaatttgaggccgggcacagtggctcatgcctgtaatcccagcactttgggaggccgaggtaggtggatcacctgaggtcaggagtttgagaacaacctggccaacatggtgaaaacccctctctcctaaatgtacaaaaaattagccgggcgtggtggtggatgcctgtaatcccagctactcggaaggctgaggcaggagaatcgcttgaacccaggaggcgaaggttacagtaagccaagattgtgccactgtactccagcctgggtgacagagcaagactctgtctcaagaaaaaaaaaaaaaaaatgaagggggaaaaaatgtttcccttggtccccagcaagtgccagaccacttcgaccaaagcataaatagtgtttcaaagaactgttaagcacgttctttggataaagaaggatgtgaccatcacctggcataggtactctgtccacctgctgccttcattacttgatgcagcagtttttgaagtctttaatcaagacctttttacgctcttttacattatcaaggaccccaaagagctttcacttatgtgaattttatctaatgatatttattatctaacattaaaactgagaaattttcaaaatattatttgaaatcaagacaacaaagcttactttttgttatgtttatgcatagactcaaggaaaagatcaagatttcaagataattacttcagaaaaatgaggttatagctatcctagtagatatgaacaaatagaactaatcaaagtacaaaagcagtagccaagagagttggtggacacctgtagtcccagctactctggaggatgagacaggaggatctcttgagcccaggagttcctgggcaacaaagtgagaccccctactctgaaaaagaaaaaaggaaagaaaaaaaattaagttcacaagtactgagaacaaattttattaatctctataaatctacataaatctctataaaatgtacatactgataatgtaaacatactactatggaaaataccagaaaatacaagcacgctcactcaggtattctattaggagacagaatgatgacgttattacacttcaaatagcccctggaaatttccactgtacactcttgagagaatgaaagtgaaaatggcaaatcatttattgttactataatggaaatagttttgccctcagagacccctggaaaagatcttggagacatcccagacctggcggaccaccattggagaaccaatgtaatcaattacttgtaaggtcatttccatttcttatcacgaataaagggtattttgtctgatgaatatcttgtcctcgtccccggaccacccttttgagaacagttgacctaaggtaaccacaggactcctggcccagtgggacccaaagcgaaaagccctggacgcgccgagggcgctctgcttaagactgagaaccgaaatgcttcctgaattaggatcattgagaacgccgagtgcagacacaaatcgaaaagcagccacccgcgccgccaaggcggggccagaactggcggcaggcggctggcccgcccggggatggggcagaagctggggcggctgagagcgcagcgcgggctcccgggagacgccggcccactgcccgcccgctcgccgcaggtaggcccggcccccgggaggtggggcgcggccaggtgtccccaggtagccgcctcctcccgtcctccgtcggccgcctccccggaccgaggcaggacctcaccccgcgcgtgttccccgggcgcccctctgcgaaccccaggcccttcccaggtttgcgcgcgggggccatccagaccctgcggagagcgaggcccggagcgtcgccgaggtttgagggcgccggagaccgagggcctggcggccgaaggaaccgccccaagaagagcctctggcccgggggctgctggaacatgtgcggggggacacaggtacgaggcctggcggcaggacctcggcggggagggggttacctggaaggggccacctcggcggactgggttggattcgaacacatagcgagggttgcccgcggcgacaggtgcccgatcagccctcggcagggtcactgggcacggcgtttgtcccaggcgctctcaggggctgcttcctgggcgcgcgtcgggttccggcgaccgaaaccgcgcgccgggcgctcttgcgcctaggctttgagtacaacaggttggtgattcagttcgacagaaactcaaagtgctgagctaggggccttttttttttaatatttttttttgtttgttttagtttgtttgacagttgccagactatgtttacgcttctggttctactcagccaactgcccacagttaccctggggtttcctcattgcgcaagaggtccaaaggcttctaagcatgcgggagaagaaggtaagcactaaaacgtccctggaacccagagccgcatagcacagatctcagtgagaaagtgcagtatttgaaattacatacccccagcaatcatagaaacactaaaatatcctttagtttaatttgtggcatatttggcaaggttgtgtttttttatgttctttaactgcaatttatagaatttgatgtctgtgagtctcctttaataagtatatacgtaagacctagtttgtggttaattgaatggaaaacctatttcagcttctgaaaatcagtgagtgacatttctctagatgaagctgtgtggcgat

SEQ ID NO: 261 - DNA, 6000 bp, Homo sapiens
aaaagaatagaaatggaaaaaagctaggcttgttgttgcatttctgtagtctcagctactcaagagactgacgtgagaggcttgcttgagtccaggaaggccaaggctgcagtgagctgtgatcataccactgcatttcagcatgggtgacagagtgagaccctgcctcaagaaagcaaatatttaagattgtacttgtgctgagtgctggatttcaaatgataggggtgcccatgtgttctttaatatagttactgtgtgtgtgtgtgtgtgtgtgcatgtgtgtgtgtgtaagaaagagagagagaggtttgtgtagtcctctaaagtgtgggacccagggcagggcccttgttgcctggacttagggtggtattgtcataagcacatacatgtattagaactgggtgagtgtagcagtgagtgtagatagaaaagaagttgacagactatgcctgggacacttagaaatcacaaagaaaagagagaataaaagaaaagaaatcaagaaaaaaaacaccaggagaatgtgcagacttggaatccaagtgaaattaaatgttggggaattatcgacaatgccaaatactgctaagagattgactaaacaaggactgataattcacctttggacacacacaaaagtagaactcactggtggtgttaaaatgagctgtttcattgactggtggggataaaacctgactgagaagagttcaagtaagaatgagaagagggtaagtagaaacagaaggtctggccagctctttagagaagtttttctataaaaggaagcaaagaagtgggatggaagctagatgaagatgtggtggagtcactagagatttatttttctttttgcctaacagaggtggaacagctgatggccccacatcttcagctgaagctccacagtcacacatacaagtgcctatctggcatctccatttaaatgtctcataggaactcacaggaaaatcaaacttaacctgttccaaatagaactcttgattctccctcactctatccccagtctgttctttcctaagccttccttttctcaataaacatcattgcccaccattcaaaccaaaagccatgtagccattccagattatttcaatttcctcaaaaacagtgcatcagcctgttagttctacttccaaaatacatctctaacttgatcatctggagtactacaataggttccctgctttcattctcgcctctcaccacctattctcacatggcagcaagagtgtaaaccagacaaagttacacctccacttaaagctttgattactcagtaaaacaatgattactcagtacacttcaaatccccactgcttaccttgagctatactgtcctacatgacctggctctttgctccttctccaatctcatcttcacttctttctctctcttgcaccatactccagacatgctggcctaaacctaattatttgtattacaaagatataaaaaaatagagaataatatttatatatatatacatatatatactttttttgagacagagtcttgctctgtcgcccaggctggagtgcagtggcgcaatctcggctcactgcaacctctgcctcccttcacgccattctccttcctcagcctcctgagtagctgggactacaggcgcccgccaccacgcccgactaattttttgtatttttttagtagagacggggtttcaccgtgttagtcaggatggtctcgatctcctgacctcgtgatctgcctgcctcggcctcccaaagtgctgggattacaggagtgagctaccgagcccagccaatagggaataatattatagatattatataataatatataataatattatagattatagagccagatctaatactttaattaatacttagctacatgtaccattaaaatgtaaactacatgtcttttctgaatctctattacctgaaaaagtgcctaacacataatatatgctcaatgcatctggtataattgaatatttgcttcacattaaaaaataagtaaaacattacagatacagtgaatgctccttatacctccttcccttcctctttccccagaagaactacctaccattctaaaggtgatatatgccatgcctataatatccctagttttaatattttgttacttgagcatttgttttctatgttttcaaaatttacagtatagaataatacgttaaatatcccttgcgatttgtttttttatcatgctttatgcctattatgttgatatatgcagttttcatatgttttttggctgtatatttcagtgtgtgaacataccataatttgtttatctatttcttactgttgaacatttaggttgtttcaaatattttgttattcccaatagtgctgcaatgaatatgagcaacatgacagttaagagggtggattctagagccagactacccaggattgaatttcaggcaccatcactagttgtgtcactttgggcacgttacttctttgtgctctagtttatttaattgtaaaatgatggcaataaattttcatgatattgttagtagaattaaatgagttaatacatataaagaacttcgaaaagtgcctggaacatattaaatctcaatgaatattgaccgttattattattacccttattattaggaattgcttaattacaggacatgtacatcttctatttcattaaatattacacattattctcctaagtgatatgtcaatttatgcttccagcaggggtatataagttccattttcctatttcctatactaattaaaaattcctgtcaatctaatggatatgaaattgttgttttacttgtactttgatagttacagcaaaattatatattttttcttgggtttattggccattcagttttcttttttggtgaactgcctttttacctacttttctttctctctctctttttttttttttttttagtgtccctcaggctagaatgcagtgatgccaccttgggtcactgcaccacagctttgatttccagagctcaagcgatcctcccacctcagcctcctaagtagctgggactagaggcgcatgccaccacgcctggctaattttgttttcattttttgtagacacaagatctcattatgttgcccaggctggtctcgaactcctgaactcaagcaatcctccggccttgggctcccaagtactgagattacaggcatgagccaaaacgtccagctttttaatttacttttctattgggttgtttgcctttttcgattttgggaactatttgtttgtttgtttgtttgttttttgagacggagtcttgctctgtcacccaggctggaatgcagtggcgcgatctcggctcactgcaacccctgcctctcaggttcacgccattctcctgcctcagcctcccgagtagctgggactacaggcgcccgccaccacgcccggctaattttttgtatttttagtagagacagggtttcaccgtgttagccaggatagtcctgatctcctgacctcgtgatctgcccgcctcggcctcccaaagtgctgggattacaggcgtgagccacctcgcccagcccgggaactgttttggatactaatcaaaacaatggttatggctgggcgcggtggctcacgcctgtaatcccagcactttggaaggccaaggcgggcggatcacttgaggccaggagttcgagatcagcctggccaacacagtgaaaccccgcctctactaaaaatacaaacattagccaggcatggtggcggacgcttatagtgccagctactttgggaggctgaagcacgagaatcacttaaacctgagaggcagaggttgcagtgagcctagatcgtgccactgcactccaggctgggtgacagagtgagaccctgtctcaaaaaacaacaacaataaacaatggttatatatatggggaatatcatttagtctgtggcttgtctttgtgtgctttttcaacttgttatacggaagtaacacattttaatacagtcaaatctaaatattttcccttatggtttgtgcttttccggtcttattaagaaattcttagccgggcgcggtggctcacgcctctaatcccagcactttgggaggctgaggcgggcggatcacctgaggtcaggagttcgagaccagcctgaccaacatggagaaaccccatctctactaaaaatacaaaattagccaggtatggtggcgcatgcatgtaatcccagctgctccggaagctgaggcaggagaatgtttgaaccaaggaggcggaggttgcggtgagctgagatagcactgttgcactccagcctgggcaacaagggtgagactccgtctaaaaaaaaaaaaaaaaattcttccctatttttgacattataaagctatttttattttctgaaaaatgtttgcaggtctttaatccatctcggccttatttttggaaatggtttgaggtagaaatctaatcatttatttcccttttggaaaaaatgtctcatcgccatttattgaagagtctgtcctttcgcccactgacttgtaatgccgtctgtatcataaaccaagttcccttgatgttactcttcatttcggcctcacaatctttgcttattttccttctaccagggatgcttttcgctatgttcctttcagggctaccttcctcttgtcccttcagatcgcagttcaaatgtcatccccctcaaatctagattgctctacaggcatttctggctccgtgatcccatgacctcaaaggggtctaggtgggcatagcctctagccagttgttgctaggctgttgtcaggactggcgatgcgtaggccactgagagcacccggagtccgagtgacggaatcaggcgggcgcccgcgtcgctaaggagtgcgtcacagtgcgcgggcggccgggggcagggccagggctgagtcacgtggcttggttgcctacgcgctggtgggccgtgggaagatggcggacggaaagggagacgccgccgctgtcgccggggctggggctgaggctccggcggtagcgggagccggagatggagtcgagactgagtccatggttcggggtcatcgccccgtatctccagcgccgggagcctcgggactgcggccgtgtctgtggcagctggagacagagctgagggagcaagaggtgtcggaggtctcatctttgaactactgccggagcttctgccaggtgaggggctgactggctggctgagggcggcggggcggggaagtcagggaaggaggccctggatcctctgtaagcagccgggtccaaactgaaaggcgccacctccgtgactcgccgcgcccccgggccgggaaggcccagctcggaagctcgaccgctggcccccctgcgccactgcccgactttggccaccgctgggtcgttttgctctgagccttactgagatcccggagggccctggcgggtccctggaagggctgtgccctgtcgccgttgcctgtgtcctggccgggtggttggagcgccactgccccctgagggattgattgcttgtccctgccgggagatccttttttgagtggagtgcagatctccgaactggtaaacccgggtttttctgaataatccagagaggtgtgttggggccagagacttatttttggagttaacatcttctgggctcctaaaaggtatgacagttggcttcgaaaggcgtctagagctttctgattagggattgcggagccggttggttgtttggtttttgctttttttttttttacgtttaagccgttctttcgtcttttctgtatttctttgagaggattgtgctaccgagaataaggctgactctttgagtagaagaggatgggaagagggatgtagagtgtggcctcttttggcagtcgtatgatcatttctgtgccttggtgggtcctaacctatgattacatatttatgggtgtgtttagt

SEQ ID NO: 262 - DNA, 6000 bp, Homo sapiens
ggaactctttcatcatgtctctttgaatctctgttggctatttttgccgttgtgttacccgtctcagtactagtacccatattcccctctcccatctccctccccacccccgcattgttttcccttctgtctccaccctaacctcttttgctcttcctgcccaccctcgacccctcccgagtcctctcccatctttctttcccctccatctcggcccctgtctctctctccatccttccatctctttctcccttcctgggcactctctctcactatccgactctaccccactcccctcccaaccccaactcccacctttcttcctccttcagcccatcttcttgtctttttttttttttttttttgagatagagtctcactctgtcacccaggctggagtgcagtggctccatctcggctcactgcaacctccgcctcctgggttcaagcaattctcctgtctcagcctcccaagtaactgggattataggcatgcaccaccatgcccagctaagttttgtatttttagtagagatggggtttcaccatgttggccagcctggtcttgaactcctgacctcaagtgatccaccctcttcggcctcccaaagtgctgggattacagtcatgagctaccatgacgagccaccatcttcctatcaatctatctatccatccatccatgcatctatctatctatctatctatctatctatctatctatctatctccctcccttcaacaaatccattccccctcaccccaagtcttacagtgaaattgcagccacagttactcccttcccccatgcaggctctcccgctggttggtggcttcgggtcccctccccagaaaaagaaaagggatgaggtgagaaggtgatggattagaggggtccacagagtttccaaatccccctatacctccaccccccatttctgcaacccagtcaggctctctggtattgcagagtaagacagacagggaccccagggccctcctttctggctccccacccacccggaagtcctccttgaggtccgacctcaagcactccagctgccctaatccaccctaggctttcccacgccccggggctgggatgaacccctggtgtccgggtctgagccggatctcccctgacagggtggggctgagattggggggaagcccttgggggacccgcacccccacaccaggagactggaatttctcctctttcatttccttattgtctctggagaagggtgtgacagggagcagaggaaggcagtgtgaagccagaagccaagtttctagtcccagacccaacccaggaccccagtgttctgcgtgcggggcttcagagttaaccacctctaaaacaggggagcagctggaccagctgatctgcaagaacctgaggccaacagggatatcccaggatggtaactttccaagttctttccagacagcaagctgccctgagtgttaacgtcaccccaagcgggagggtgctatgggcaagaagtggtttggggaccctctcagctctcagttgctggctgagtgtaggtatttctctccccattgttctgacccaaggggaagaggtgggcttatctgatgggaaggctggggagagcctcagacagtatcacccaaccatttccattcctccaaatactgactctcccaaaatatgccctgaaatgctgattacctccagactgtccctctactattattattttttgagatagggtctcattctgtcacccaggctggagtgccgtgatacgatcacagctcccggcagctcgaactcccagcctcaagtgatcctcccacctcagcctcccaaccaagtagcttagactacaggcatgcctgactaattaaaaaaaaattttttttttaaagacaaggtctccctatgttgcccaggctggcctcaaactcctgggctcaagagatcctcccacttcgacctcccaaagtgctgggattacaagtgtgagccactgtgccggctttccttcaatttctgacacaatttccatacaaattgtcccctaaacttggatctattcagactgtgccccaaatatcaactcctcctgcctagacccccatcatttacttaagatgtgcccccaaaacaactgtagttggtttgtacaattggtctgtaggtggttcccttaaatcaggtccccagactgagttctgcagaggtccagctgggatcacccccactacctggaaccctccatttcccacctgggtctctgccttccgcatctcacaactgatacctccagccaccctgcctccacctctcaacactcccagtccctttccctgttggccctgccccaccccacgtgcacctcacacctccccaaacccaggactggcccttcccaggcaccttgcccagccctgaaggcctggggatccaggagtcccaccctacagtttcgagccccagacccaagactcaggcacactggggcccccgcagtcaccagatcttgactccttggagaacctagccattcctgccccacaccccacctcaagcccacagtccccttccaggttagaagtccaagtgtccagacccccataattctcagaccaagaacccaacccccagccccaacaacctcacaacgttgattacagagtgaggtagctaaggtgtaggggtcgttgcagcaagacgaatgggggtcagacttgaggaaggactttctgtctgtccaggtgaggggattagaatatgccgccaccccccactccagggaagccttgtctgaggtgagactggatgggaattttagcaatagctggaggttgctggactggcggggagcaggggaaggtgcacaatctaaaactctccatcttccgacttggggagtccctgcggagggtcatgggtagggatgggggggtggagatcggcccctctcctgccaatgctgatggctacatcttctgctcccagatgcccaactctaagccacctgttatttcagactccaaaaacgaagcttcatctctgagcacccccatctctgacccctgagcaccaatccctatgtctgaccctaccttagattaccagctgatccttagccccgaaccccggttctttaacactgtgtgctggccctgagctcccacctcagtcttccccttaatggtgactcctcctccatcttttagtctttctttccctccaactttgaacctcacatcctgaaaccccctagtctgtcccctaccctggaactctgattcctatctttggtttgtacatataaatcccttgctttttggggctccaacacccggctcccaagtttaaggtgtgacccgacccttggctaaattttcctgacttccatttttaagccctggccgcggcgaggctgcccaaacagcgctcccatccatgcctcgtccccggtccccgacttccacacctggtctccgtgttcccagttcctcagctgcccaagtagacgcctttgcctccatttgaacccacaaccagtccctgctccatgtgagcccacaccccgatacctgcccccaacttcccgctccgccatccccgaggacacacctcgcccgcctccgggtagtagctccactcggccaggtcatgggcctccatcttcactgagcccagcatcccccgggcttacgcccccacccgcccccgctccggccccgggggaacggagcgctctggatctctcagcgggcacggcccgagctcccaccggcgcccgcccgtccgaccgcccggggtacggctgtcccgagcgccgcgggaggcggccacgctttatagccgggacacccccgccctcgcccgccccgggctcccctcccgcctccccgagggcggcgcgctcggactggggcgccccctgcgggatcgccaggagacagacctcaggcgccgggggccgcagccccaggacgcgacagctgggggtgattcaggagtgagggagctgcccgcagcgacgctgcagataccaagggccccgaggtcagaactctggagcctttctacctcagggggcttcatcatctcggcaggagaggacgaagagccagagccctgcatgaccgtggcggaagaaaggggaatcagaacgctagggccactatgcgactacaaggacccgtaaaaggtccccgaaatcacatccccattggacagacaggaagactgaggcttccgacggctagaaatgcttaacttggccgggcgcggtggctcacgcctgtaattccagcactgcaggaggccgaggcgggcggacgaatcacttgaggtcaggagtttgagaccagcctggccaacagggtgaaaccccatctctattaaaaatacaacaactagctaggcgtgatggtgcgtgcctgttatcccagctattcgggaggctgaggcaggagaatcgtttgaacctaggaagcggaggttgcagtgagccgagatcgcgccactgcagtccagcctgggagagagagcgggactccgtttccaaaaaaaaagaaagaaagaaaagaaaagaaaaagaaatgcttcagactgttgaaagggtcaagaacaaagatggaggggatcggggcctctccgcagaccccactagggcaacagaccacctcccctccaagacccaggagcttcgctgcccgaactccgcactctccaagaccagccagccgtccagggactcagcaccactgagaactccatttcccagaatgctctagctccctttccgcccggtgcctccgaagggactacatttcccagaaggcctagccggacccagagccggaaatgaagggtctgctcgccgtagtatggaggcgggcagaatgccgctcgcacgggacgaggcatgggcggggtcgggctgtgctctggactccatttcccggcggccctgggtgtgtggcgcgtgcgcaccgttcccggcgacgaacggaagatggcggcggcggcggcggcggagtgtaggaagaggcactgctgagggggcgcgaggggaacggaggccagagctgcggtgagcgggaggcggcgtttgggcccggagacgaaaggaggaggctcctaaagaagcaggggctcgggcggggagggcatcgccgtggggagaggggaacagtggctttcgcgacccatgtttcttcccttgctcaggacccttccttggctccctagtgccctcgaggcaaagttccaacgtggccccccgggcgccaccgccccgcagacctcgcttgcttcgactcggcctctttgctttttcccccacctctaacagccgccctggcctttcggttccttaaacttgccatgcgctttcccgcttcggggattttgcacaggctgtcccttctgcctgcaacatccttttacccattcggcttggctaactcccatttcatccttcgggtctcggcaccaacgtcacttcctctgcgaagccctccttccctgccctccatccagaaatccgcctgttaaatgcttttgtcggtccgtgttccttcatgtcacgtgtggtctaatttgttatccgactcttatctgtgtgctgttttatgatgtctatgaccgtgtgttccatgaaggtagggactaggtttgtctctgtcgccactgtgttctcagcacagcgccaatcacgccggagacgcccagctaatgttcgttgaaggaataaaagatactcctagagccagtttggggaaacagggtagtcatcagattcctaggtagcagtggggcagggtaccacttcttaacgagtacatcgagagggaaggggaaacagtgatactgttcatcatagcaaaaggctacacgcatcccaaatgttcttaaataagaagattggctgaaagaaactataatacatccacataaaaaatactatgcaactctaaaaaggaatgaggtagataaaaggaaat

SEQ ID NO: 263 - DNA, 6000 bp, Homo sapiens
gggcggatcacttgaggtcaggagtttgagaccagcctgcttgggcctggcacccaggatgtgcttgccaaatgcttctggaatggatggatggaaccccatctctactaaaaatacaaaaatcaggcgtggtggtgcacacttgctatcccagctacttgggaggctgaggcagaagacatgcttgaacctgggaggcagggattgcagcgagccgagatcacgccactgcactccagcctgggccacagagcaagactccgtctcaataaacacacaaacaaaaaaacccacatctacttctattattaacccacctacttttctgagccccaaggggctttctggacagattccagcagagcggctgctggtcaggcagcagtgatctctaaagctacgcaggtaattttatcagatgctggcagagaaggggttctcatgggtgggtacctggcaggcggatcggggctcattcctttcttcttggtccttggaggggcagggcagtgagagacacagctctacccccactacccagcagctgttgtctctcccacttccaattcctgggtgtgaggcccacctgatcctcctttcccaaggaggctgtgtggccccaaaggcctcccaggtcatgccctagtcaggcatagcaactgtgttgttccctcccagatacgaggggcaaaggagttagtgtccaaggctaagtcccacgtgcagcactctgtatggaaaaacagccccaattagcaattcattcatccatccatccatccatccattcatccatccatccatctattcatccatccatcatccattcattccagaagcatttgctgagtgagcacatccatctatccatgcatccatccacccacccattacccatccaattatccatccattccagaagcatttgccgatcgagcgcatccatccatccatccacccatccattccagaatcatttaccaagcaaacacatccatctatccatccatccacccactcattgattatccatctatccatccattatccatccatccatcccagaagcatttgccaacagagtgcatccatccatccacccacccacccattcattatccatccatccattcattctagaatcatttgccaagcaaacatatccatctatccatctgtccatccacccattcattatccatccacccactcattatccatccatcccagaagcatccattattcatccatccacccattatccatcatccatccacccattatccatccatccatccatcatccatccatctatacattatccatccatctatccattatccatccatccatccattatccatccatccatccattatccatccacccacccattacccatccaattatccatccattccagaagcatttgccgatcgagcacatccatccatccacccacccattcattatccatccatccatcatccatccatccatccatctatccattatccatctatccattatccatccatccgttatccactcacccatccatccatccatcccagaagcatttgccaagcacatcctgggagccaggcccaagcaggcgggcatcctcctggctctgagaggagcttgagcagagcccacagacagcaccaccctgctggcgggtcaccaagccaccaagccagtgcaggctgaaggctgagcacacagagcaccggtctcagtgtctggacatggttagccgtccccacccgcatggaaggaaacttcttctctcccctaagacaggctttgcagacttggaaagggaacgccgtgttgcagggctcaggcctggagccccggccagagcagatgcgagccagcctcatctggaaatagcagctctggtcccggcctcgctgaggcactgaaaaccagcaccagggccccgtccagcccggcctcgctgaggctgggaaacaaacacaggtctgtaaggcgcagctccccagcaaactccccacccctgcccagcacccacagcgctcctggcctctgtcctctattccaggacccctgtagcgagcctggcttggtcctgggtcctcaggggacactgtccacccccgctgccctggcagagcctcaggaatgtgcttggtctccacagccctccccacagcaatgtcccaaggttagacctacccatgcctcagtgacttctgagacacccgtcccgccgcccagcagccactccagcctccagagctggccccaacctccagccccaggctgagccgccctccccagaggtcaggaaaagcctcaggcagggctcacagctgcacccaggagtcacccagggtgaccccgctctctggggcgggtcactcctgcccacccacagccggggactgtcattttctcagtacacaaaggagagaaaggaaaaacaagagcgagaaagacacagggagagaaaaggaagagagaaggaaagaaaaaagaaagacacagggaaagaagaggaaagaaaagaagggaggaaggagggagagtgggaggagagggaaagaaagggagagacagggaaaggcaggaaagggagagatggggaaaggcaggaaagagagaggcagggaaaggcaggaaagaaagggagagacagggaaaggcaggaaacgcaaggaagcaatgggaagggaaagaagtgaaaaggaaggcggggagggagggacgggagaaagggaggaaaagagcaaaggagacagggagacaggaaagaaaaaggggagggaggcaaacggggaacgggagaaaaagaaaggaagggagagggaatgatggagaaaaacaggagggagggaggagagaagaaaaaggaaaaggagggaggagagaggaaagaggcagggaggtaggatagaaaaagacggaggagagaagaaaaaagaaaaggaggcgggacgcagtggcgcacgactgtaatccagcactttgggaggccgaggtgggcggatcacctgaggtcaggagttcaagaccagcctggccaacatggtgaaacgccatctgtccttaaaaaaaaaaatagccgggtggggtggctggcacctgtaatcccagctacttgggaagttgaggcacaagaatctctagaacctgagaggcagaggttgcagtgagctgagatcacgccactgcactccagcctcggtgacagaacaagtctccatctcaaaaaaaaaaaaggaaaacagggagaaagggagaaacagagaggaaggaaagaacaagacaggaaagaataaaaggaagaagaaaaagagaggcaaagggagagaggaaaaatgaaaaaaaaattaaaaaatggaaaagagacagctaggcgtggtggctcacacacctgtcatcccagcactttgggaagccgaagtgggcggatcccctgaagtccggagttcgagaccagcctgaccaacatggcgaaaccccgtctctactaaaaatataaaattagctgggcgcggtggcgcatgcctgtcattccagctacttgggaggctgaggcaggagaatcgcttgaacccgggaggcggagcttgcactccagcttgggcaacaagagcgaaactctgtctcaaaagaaaaaaaaaacggaaaagagagaggggagaaagggacgagaggaagggagacaggaaataaagaggaaaaggaaaagagagggaaggagggaaaggcagaaaagggaggaagggaaggaaagaggaaaagggaaggagagacggaaagagggagaaaaaagagggagggagcaaagaaaaaacagaggaagggcggagggagaaaagcagaaaaaggaaggaaaaaaatgaaaaagagggaagaaacgtagcaagaaaggaaggagaaagggagagagaaatgaaagaaaaagggagggagggaaacgaaggcagagacggaaagacggagaaaaaggagggaggcgggaaagcagcaaaaagcaaaggcaagcagggaaggaagagacggggagaaaagggcgggcgggagagagccgggaagggagaggaggcgggaggagggaggagggaggcgggagggagggaggagggaggcgggagggagggagggagggagggaggaagggcggagtgggaggtcgcgaaggaggaccccggccgcagcccccgccgggcagacacgggcacagacacggggaaataggggagcccgggcgggtgggcgcggcccacggaacccccagccccggcgcggagggcaccgcggggtcaaagaacggaggcccagagagatcccccccccaccaacctaggccgggcgcggagggcggcgcggagtcacggatcggcagcgggactgagccgcgcccacgtggaagccgccgcaggcttcgcgcggggccccccgggtgcacgcgggcaggggccggggtctcccgacgcacgaccccggagagtgttgaaagggtcggagctgcccggaggtcaagggtcaagggtcgggggtcggggcaccacatgtcgcacatcccggcggggtcgccgcggcctccgggagaaagcggacgacgcactcggagcgaactgggcatcagggtgggcttctgactccgcagctgccctcccgcccgctcgggtactggcagcggcctgaccttcacaaggtcaaggctgccgcggaacccccagcggcccctacggcgcatgggcggggcctggctcccggcatacctaggggtgcggggcgggacgtctccggggagcgcagccaatgggcgcggttcgctggagtgcggggcgggacgcagcgggattcccggcagccctcagaggcgaggcacgcaggctggtgtggggcggggcctggcggcgcagccaatgagcgcggcgcgaggaggcgcgggggcggagagtgggcgtggcgtcggcgtcttagcggctgcgcggtggctgctccgtcctttcggtccaggcggcggcagggctgagccagcgacgccctccattcactctccgcgcccgttctccggctgtcctcccgttccgctgcccgccctgccaccatgacggaacaggccatctccttcgccaaagacttcttggccggaggcatcgccgccgccatctccaagacggccgtggctccgatcgagcgggtcaagctgctgctgcaggtggggacgcgggcgcggccgctccggggactaggggacgggaaccgagtggccgggtcgggcggggacgtgggcagcagagccttgcaggcgggcgccggaagtggaaggccgcgatcgctttgtccacgcgccgccggcttccgggggccgcgtcacgtgaccgctgctgcagggcgtggcgacgtccacgcgtgcgcactgggcccggcgggcggggggaaatgcggcacggattggagggcgcatgcgcgctgagcagggcccatggacggaccctgcggctggcgggccttgaccttgagctcaatcctgcgggtcccccggctgggaccaacccttccggtggatgcctggcaggtgtctgctcttgctccctccaccgtgaagggtaattctaaggccaatagggcaacgagcctgcccgcaggtgtcctggaataaccaggatatggttattggtggttcttacccccttcttagctcatttgtgcaattctgatccagagcaatgcattttttgtcttttgggagaggcttatagaaagtagcatgatgcctaggaacattgccgccaggacgtccttgctaacgttgtactccgagtgacagctcggtgatgggaatgaataggcttggctgcaaggacaggtcacgcccgcgatcccagcgcttttgagaggcccggggagtattgcttgaggccaggagtttgagagcagccggggccacacagcaagacctcacctcaaaaaaaattattttaacttaacgaagcaggacgtcccagtgcattg

SEQ ID NO: 264 - DNA, 6000 bp, Homo sapiens
aggttgaggcagaagaatcccttgaacccaggaggcagaggttgcaatgagccgagattgcgccactgcacttcagccagggtgacagagcaacactacgtcttgaaaaaaaaaacaaaaaacaggtttttaaaaaaattatgggccgggcgcggtggctcacgcctgtaatcacagcactttgggaggtggaggtgggtggatcacctgaggtcaggagttcgagaccagcctggccaacatagtgaaaccccgtctctactaaaaatacgaaaaattagccaagcatcgtggcaggcgcctgtaatcccagctactggggagactgaggcaggagaattgcttgaacccgggaggcaaaggttgcagtgagccaagatcgcaccattgtactccagcctaggcaacagggcaagactcagtctcaaaaaaaaaaaaaaaaaaaaaaaggttaaacatagaattgccacatgacacagcagtaacactcctaggtatctacccaagagaaacaaacatgtaacatccacgcaaaaactcacacacctatgtgcatagcagctttattcataacatccacaaagtgcacacaacccaaatgtacatccacagatgaagggaaaatgctccattcatacaatgacacggtgttttgcaatatgaggcaatgaggctcggacacaggctacagattggatgaacctcgaaagcatcatgcccagtgaaagaagccagatacaaaagaccacatagtgagtgattccattgatacgaaatgtccagataagcaaatccatagagacaggaagtggattagtggttgccaagggctgggagagggggatcaggagtgactggaatggactttattttggggggttgatggatatgttctaaaattgatgtgatggccgtgagctgtggctcacacctgtaatcccagcactttgggaggctgaggcgggcagatcacttgaggtcaggagttcaagatcagcctggccaatctggtgaaaccccatctctactaaaaatacaaaaatgagccgggtgtgctggcgcgcacctgtagtcccagctactcgggaggctgaagcaggggaatcacttgaacccgggaagtgtaggttgcagtgagcccagatcatgccaccacactccaccttgggtgtcaaagcaagactccgtctcggaaaaaaaaaaaaaaaatttatgtgatgatggctgcccgactctgaatatactaaacaccactgaattatcactttacacagatgaattgtacagtatgtaaactatatctcaatacagctgttatttaaaaagttcttgcccggcgcagtggcttgcgcctataatcccagtgctttgggaggccaaggagggcggattatgaagtcaagagatcgagaccatcctggtcaacatggcgaaacctcatctctactaaaaatacaaaaattagctgagcgtggtagcacgcgcctgtaatcccagcttctcgggaggctgaggcaggagaatcccttgaacccgggaggcggtggttgaagtgaaccgagattgcaccactgcactccagaaaaaaaaaaaaaaatcccctttggagctgagttaaggagaaaagagaacagggaaaaggaggaggcaagaggttacagtttcagatgcagtgctcggggatgctcttattgcaaagatgatgttttaataaagatctgaaagaggagctgggcgcagtgactaacggctgtaatcccggcactttggtaggccgaggtgggcagattacttgaggtcaggccttcaagaccagcctggccaacatggtgaaacctcatctctactaaaaatacaaaaattagccgggcatggtagcaggcccctgtattcccagctactcgggaggctgagggaggagaatcgttggaacccgggaggcagaggttgcggtgagctgagatcgcgccactgcactccagcctgggcaacacagcaagactctgtctcagaagaataaaataaaaggagaggagagggagattctaacacagaaacacagagacagacacacaggggtcaaggccaggtgatgacagtggcagagattggagtgacgaagccacaagctgagaaacaccaaggactggcggccacccccagaagctggaagaggcaggaaggatcctcccctggagcctccagagaggccacagatctgcagatacctggattccagacttccgccccccagggacttgctcaatcccagaggacccaccgaacagaagacgcagacttggttcttctgtgctatcagtttctcgaaggtctacagaggccagatgccaagttctctgacttacacaggccttgcttttggctgaggcttcgatatctgcgtcctgcaccctgggattatctcctcctggggagcatccttggggccagtcacacctggcaccctgccctcgtagccttcctgagtcagcacagctcctggtccacgggaagtcctccgtaaacagcctgagccacaaacatgttgagatgacgtcctcgcaaggcagctgagggctgcagtgatgcctgttatctgcagtcagttttccaacacataggaaggcaatacaataatttaaaaaaaaaaagggggggtgggccgtgcacggtggctcacgcctgtaatcccagcactttgggaggccgaggcgggcggatcacgaggtcaggagatcgagaccatcctggctaacacggtgaaaccccgtctctactaaaaatacaaaaaaattagctgggcttggtggtgggcacctgtcgtcccagctacttgggaggctgaggcaggagaatggcgtgaacccaggaggcggagcttgcagtgagctgagatcgccccattgcactccagcctgggtgacagagcgagactctgtctcaaaaaaataaaagtgggggtgtcagctccatgaggccagacactgtgtctgttttgtcctgtgtcctctgtgcccaggacactatcctctgtgctcaggacactgtccagcacacagtagttgctcaataagtatttgtgaatgttgtcttaaaatagaagttggccttccaaaaggatttctttgctatgcacagcattttatgttttttcattaatttttatttaattatttttttgagatggagtctcactctgtcacccaagctggagtgcagtgacgcgatcttggctcactgcaacttccgtctcctgggttcaagtgatgctcctgcctcagactcctgagtagctggaattacaggcacccgccactaggccaagctaattttagtatttttagtagagatggggtttcagcatgttggccatgctggtcttgaactcctgaccacaagtgatccacctgccttggcctcccaaagtgctggaattacaggcgtgagctacaatgcccagccatgtttttttattaattgctcattttttttttttttttgagatggggtcttgctctgtcacccaggctggaatccagtggtgtgattacagctcactggatccttgaactcctggactcaagctatcaagccacctgagtagctgggcctacaggcatgagccaccaggcacagttgattttttttttttttttttggaaatggagtcttgctctgttgcccaggctggagtgcagtgacaggatctcaactcactgtaacctgtgtctcccaggctcaagcgattctcctgcctcagccacccaagtagctgggattacaggctgagccactgcgcccagccaaattaaaaaaaattttttttctgttgagacgggggcttaccacattgcccaggctggtcttggaatcttgggctcaatcgatcatcctctcaccccacagcctcccaaagtgccaggattacaggtatgagccaccactcctggcagtcacccacattttaaaaataagagattgcaagcagggcacagtagctcacgcctgtaatcccagcactttgggaggccaaggcaggtggatcacctgaggtcaggagtttgagaccagcctggccaacatagtgaaaccctgtctctactaaaaatacaaaaagttagctggtgtggtgttgcatgcctgtaatcccagctactcgggaagctgaagcctttttgtatttttagtagagatgggggtttcaccatgttggccaggctggtctcgaactcctgacctcaagtgataacacccacctcggcctcccaaagtgttgggattaccggtgtgagccaccgtacccggcctctttcaggtctttcttcagatgtcaccacctcagattctggccacccttcctgaaactgcacaccctatacatacaccgcccttggctaccgaattttttctcgttagcctttttcaccatctaataggtattgcatttacttatcgtgttattttctgtctctataacaacactgggaggcgtacgagggtaagggctgaaggctctcttgtcctcaaggccatgtactatttattacatacatgaatgaatgaacgactgcatttcttcctttttttattcctcacctacttaaggttcgagctccctgagcccattggccaacacctctggagtctgaccacgcctagaaacactgcgcatgctccgttgctagccagcccaggcagggcgctgaatcggcacaaaccagtctcacttcttgtaccgcagtggggaggttggagagaattttttcccatgaaagggcatacgttgcccgtccccttccccgaagaacgcactaggaatactgttcctgcgtttgcatgagctgtggcaccagcaccgactcagccttccgggcctccctcatgcacggagcctctcactaggtctcacccgcggctgcgttggtgccgtccggcacggtcacgtgggcgagaaaatggcggcccccagaccgcactgcgggcgtcgcggcaggtgaagcggtggtggcagaggcgcctgcggttactggccgggccgacgggtcctgagtctccagagctcggtgaggcgtcccggaggcggcgatcacggtgtggggcccgggtctggcgggcggtggcaccgggagcgcctcgttagggaatccggtctcagggattcgttgactgtggatggggcgggttaaggggtctcgagtcccggcgatctctttcctctgggattttttacatgaaagagtgcccacctcacgtcctgaagctcctatgtcgtacggttgggtctcaatggtccccagtgccctgccagctcgcacaggcctgccctctggtttctgatgacccctctttaaaggtgtcactctcctttgatggtcacctgtgcttaggtggctacactgccctcgtcaagcccaggcagccttgctgacgccactgttcaccagagagggctgccagcatgccatagccagcctgtcttgagatgaagcatccgccaggttctcagccgatctggaaagagaggggtcccttctccccttggctgtgttcttttatcctaagtcattcaacaaagcgttggtggtttagagcccgactctggagccagacttcctggattcctaactcttcacgctgctcccaagcaagttcccaagcacagtcccaaactgtgcctcagtttcctcacctgtaaaatggggacaatcttagtaactacctcacagggtagtgatgtagatcgaatgaattaatgaatgtaaagagcatggagtgcctggcgcgtagcaaatgctacataagtgtcagctgctattgtcacggttgtcgtttttattttatttatttattttgagacagggtcttgctttgtagctcagtctggaatgcaatggcacgatctcggctcactgcaacctccgcctctcgagttcaggcgattctcctacctcagcctcccgagtagctgggattacaggcgcccaccaccacgcccagcta

SEQ ID NO: 265 - DNA, 6000 bp, Homo sapiens; identical to SEQ ID NO: 16

SEQ ID NO: 266 - DNA, 6000 bp, Homo sapiens; identical to SEQ ID NO: 32

SEQ ID NO: 267 - DNA, 6000 bp, Homo sapiens; identical to SEQ ID NO: 32

SEQ ID NO: 268 - DNA, 6000 bp, Homo sapiens; identical to SEQ ID NO: 28

SEQ ID NO: 269 - DNA, 6000 bp, Homo sapiens
tgtttgtgcttagcaaggtacatttctccgcactgagtggagattttagtatagcagtgaagcagtaactcaggtcaaggcagcactgctgagttcagttcatcttgtggctggttcctggttattggcacctggcctttgtttctgtaagcaagcgcagctgggaggatggttaatttcacaggttttgggacttcctgaaagaactgagggccagcgcagtggcccccgcctgtagtcccagcactttgggagtccaagacatgcatatcacctgaggctgggagttagagaccaccctggcaaacatgatgaagacccgtctctactaaaaatacaaaaatttggctgtgcacagtgacgcatgcctgtaatcccagcactttgggaggccaaagcgggtggatcacttgaggtcaggcgttcagaccagcctgggcagctgctctctgcccagcgaaaccctgtctctattaaaaaatacaaaaaattagttgggcctggtggcgggtgcctgtagtcccagctactcgggaggctgaggcaggagaatcgcttgaacctgggaggtggagatttcagtgagccaagatcaagccactacactccagcctgggtgacagagcaagactccgtctgaaaaaaataaaataaaaatagaaaaattagccgggcatggtggcgtgtgcctgtagtgccaactgtttgggaggctaaggcacaagaatcacttgaaccctggaggtggaggttgcagtgagcccagatcacactgggcaacaaagtgagattccatttcaaaaaaaaaaaagaattgaggtcatgttgcggtaacagtaccagatccaaccaaacaagcacataagcaacaccaggagtacagaagactaaattactttttttcttttttttaagagacagggtcttgctctgtcacccaggctggagtgcagtggtgtgatcaaagctcactgtaaccttgagctcctggacttgaggcatcctcccacctcacctcccacatgccaccatccccagttaatttttttttttttaattttttgtagagacagtctcactgtgttgcccaggctggtgtccaactcttggcctcaaacaatcctcctgccttcgcctcccaaagtactgggattacaggcatgagccactgtgcccagcctaagctacatttttttttttaattgagacggagtcttgctctgttgcccaggctggagtgcagtagtgtgatctcggctcactgcaagctctgcctcctgggttcacaccattctcctgcctcagcctcccgagtagctgggactacaggcgcccgccaccacgcccggctaattgttttgtatttttagtagacatggggtttcactatgttagccaggatggtctcgatctcctgacctcgtgatccatccgcctcggcctcccaaaatgctgggattacaggcatgagccaccgcacccggccataagctacattttaaatctgcagtgagatagtgctttacaggttagcaaaaaataaaataaataaataaatttaaaatgttaaaatctgtaaatatcaagtgttggtgaagatgtcaacaatcccactactgttgggcttgcaagttggtgtgaatgataccctgtgacgcagccaaacctctcctaaataaacctcaggaaaactcacagccatcaggatacatgtacaagaatgttcacagcagcactgtaaccagtaaaaaactggaaacagcccttatatctatcaaaattagactaaaagtttttgagctaggttgggtggttcacacctgtaagtcccaacactcggggaggccaaggcaggaggactgcttgagcccaggattttgagaccagtctgcggaacacagtgagactcccatttctacaaaaaagaaagtttctggctgggcatggtggctcatgcccgtgatcccagtgctttggaacgccaaggcagaaggatcgcctgagctcaggagtttgagaccagtttggacaacatagtgagactctgtctctactgaaaaattagccatgcatggcagcacacaccagcagtctcagctcctcgggaggctgaggtaggaggatagcttgagcccaggagttcaaagctacagtgagtggtgattgtgccactgcactccagcctgaatggcagaacaagaccctgtctcaaaaaaaaaaattatatatatatatttctaaaagggctgggcatggtggctcatgcctgtaatcccagcattttaggaggccgaggcaggaggattgtccgagcccaggagtttaagaccagcctggggaatacagggagaccctgtctctacaaaaaaagtaaaaaattagctgggcatggcggcatgtgcctgtagttccacccccggctgaggtgggaggatattttgagcctggaaggcagaggttgcagtgagctgagatcatggcacgcctggctaatttttttttgtatttttagaagagacagggtttccccatgttggccaggctggtctcgaactcctgacctcatgatccacccacctcggcctcccaaagtgctgggattgcaggcatgagccaccgtacccagccaatttttgtattttttagtagagatggggtttcaccatattggccaggctggtcttgaactcctgacctcgtgatccacctaactaggcctcctaaagtgctgggattacaggcgggagccaccgtgcctggcctagagaaagaattattttttaaggcatcaagaaccttaaacattatacacaagggtaaggccaccatcccaaggcatttgacttgtcacctctcttggaagagccggggtagatgaggcagatgttctgggcagagggcaggacaacagtttggggtctggtctgctctcttctcaggctgggctgtggagggggtgggaaggtgggcagtgcatatctcaggcagccaggcctttattacatttgcaaagctagtctgcagatgcagcacaagataaagagctctgtccagagccacccaccacactgctgattgccctggcagacacgtgcctgccagataacatctttaatatccagggggaaatgaattcccctgcttggtctgcccatttggcctagcctctcatcacaatccgtttatctcacagagctgcctcccccccgtagagaggagaaattattgttctgccactgagttttctgccacagctgagaacacactgtcaaagtggcagggcgtgctgtcggtcacgccttcttttcttccttcctccattcagcttttatggatgcttttgcattagagctgtgccaggcacaggggacctgggatgaatcaggagtgaaccccatcctggaagagtgggcagtccagtggtgtagacagagtagaaagcaaataatcacagaacagagtgtaatgggtctggtgcggtggctcacgcctgtaatcccagcactttgggagactgaggcaagcagattacttgaggtgaggagttcgagaccagcctgaccaacatgtagaaatccggtatctactgaaaatacaaaaagtagccaggcgtgggggtgcaagcctgtaattccagctactccggaggctgaggcaggagaattgcttgaacccaggggcgggggaggaggttgcagtgagccgagatcgcaccactgcattccagcatgggcgaaaagagcgaaactccgtctaaaaaaaaaaaaaaagtataatggaggcaatagagccacaggagcaaagcagggtgaaaagcttaatttcaccaaggtggtgatctgggaaggtttccagaggaaatttttatttcctccaaaataaagtgtatatatatatatatactttatatatatataaatatattttttgttgttgttgtttttgtttatttgttttgagaggaggcctcactctgttgcccaagctggagtacagtggcgagatctcggctcactgcaacctctgcctcctgggttcaagcaattctcctgcctcagcctcccgagtagctgggattacaggcgtgcaccaccatgcccagctaatttttgtacttttagtagagacggagtttcgccaggttggcctgggtggcctcgatatcctgacttctgttgcccagagtgatcatggctcactgcagcctcgacgacctgggctcaagtgatcctcccatctcagcccccagagtatctgtgactacagtcacgtgccaccacggccggcctcctgtattcttatatgtatacaatatctcacaattaaagggtaaataaatataagatctagtcaagggtattgggaggactggcctagatatttctttcactaaactaaattttaactcttaagaaatgttcacaataaaattgttatcatagtccataaaatcggtctttttagttgccacaattataagaagttgcatacaattacaagagtaaaacagaattataagacagcacgttaggtttaagatttatggccgggtgcggcggctcacgcactttgggagcccgaggcgggcggatcgcactttgagagaccaggagagcgggacccagtctctacaaaataaaaataaaaataaaatgtggggagagcgtgacgttttccaggtacagaggggaggtccaggcagaagcgcaggtagaaagtgtgaatatgctgagcgtattccgggagcagcaagttaagccggtgtgaccggagggaaatggaggcctggctgccggacggtgagggtgactgcgcgagcgtccgcccaagaagtctccctgccttcccgcctttcccctgtcttgggccccttcttgctttcctttcgcgctctgtgctgactccgcccctccggcggcgcccgtggccccgcccctgagggaaacagacaaggggcggggccggcgcggtcatctctctgcgccttcccgcagggcgccgagcacctggcgccgcctgcctgacgtcacggtcactgacagcgtgagcccgcggcggctgctgccatggtggctggcggccgggtaagggtctgagtggatctcctgccaggccagagcgccttcgggggccgcggcggaaggccaggagtttgcagccagggcgccgggtttgtggtctgcagtgtcgtgaggctgaggtgggggttgaaggcccagaagccggactctgtgacccgggtcggggggtgtactggaggggcggctacgtccaggctgggtgagaagagaggcagtggggcccaggaggctggaggaagccttagggttcagactggggtgcacgtagtcgagagctcagggtttgggcaaggggatacctgccggggttcagccttgagggtgggtttaccgggttcacgaatctctctctctccttacccccgcccgcccgcccgcctgcctgctcccggtgacttctgctggccgcaggtgcagcatgtctagactgggagccctgggtggtgcccgtgccgggctgggactgttgctgggtaccgccgccggccttggattcctgtgcctcctttacagccagcgatggaaacggacccagcgtcatggccgcagccagagcctgcccaactccctggactatacgcagacttcagatcccggacgccacggtaggagcccgtctcctgagaccgcggtcactgcagactaatgggcctgaggtctgggctgctttcggtggagactgtgggacagggtaacggagagaagtgctttagggtttcacttttttggaagcttgttgaaaaagcagtcgtcgggctgggcgcggtggctcacgcctgtaatcccagcactttgggaggccgaggcgggcggatcacctgaggtcaggagttcaagaccagcctggccaacgttcaaccagatgtcaacatggtgaaaccccatctctactaaaaatacaaaaattagccgggcgtgg

SEQ ID NO: 270 - DNA, 6000 bp, Homo sapiens; identical to SEQ ID NO: 20

SEQ ID NO: 271 - DNA, 6000 bp, Homo sapiens; identical to SEQ ID NO: 21

SEQ ID NO: 272 - DNA, 6000 bp, Homo sapiens; identical to SEQ ID NO: 21

SEQ ID NO: 273 - DNA, 1366 bp, Homo sapiens
cgcagaactcagagctgctcttcctctgtggccagttggggaccagcatcatgaagtggatggtggtggtcttggtctgcctccagctcttggaggcagcagtggtcaaagtgcccctgaagaaatttaagtctatccgtgagaccatgaaggagaagggcttgctgggggagttcctgaggacccacaagtatgatcctgcttggaagtaccgctttggtgacctcagcgtgacctacgagcccatggcctacatggatgctgcctactttggtgagatcagcatcgggactccaccccagaacttcctggtcctttttgacaccggctcctccaacttgtgggtgccctctgtctactgccagagccaggcctgcaccagtcactcccgcttcaaccccagcgagtcgtccacctactccaccaatgggcagaccttctccctgcagtatggcagtggcagcctcaccggcttctttggctatgacaccctgactgtccagagcatccaggtccccaaccaggagttcggcttgagtgagaatgagcctggtaccaacttcgtctatgcgcagtttgatggcatcatgggcctggcctaccctgctctgtccgtggatgaggccaccacagctatgcagggcatggtgcaggagggcgccctcaccagccccgtcttcagcgtctacctcagcaaccagcagggctccagcgggggagcggttgtctttgggggtgtggatagcagcctgtacacggggcagatctactgggcgcctgtcacccaggaactctactggcagattggcattgaagagttcctcatcggcggccaggcctccggctggtgttctgagggttgccaggccatcgtggacacaggcacctctctgctaactgtgccccagcagtacatgagtgctcttctgcaggccacaggggcccaggaggatgagtatggacagtttctcgtgaactgtaacagcattcagaatctgcccagcttgaccttcatcatcaatggtgtggagttccctctgccaccttcctcctatatcctcagtaacaacggctactgcaccgtgggagtcgagcccacctacctgtcctcccagaacggccagcccctgtggatcctcggggatgtcttcctcaggtcctactattccgtctacgacttgggcaacaacagagtaggctttgccactgccgcctagacttgctgcctcgacacgtgggctcccctcttcctcttgaccctgcaccctcctagggcattgtatctgtctttccactctggattcagccttctttttctggactctggactttctctaataataaatagttcttctaaaaaaaaaaa

SEQ ID NO: 274 - DNA, 3646 bp, Homo sapiens
ctctccggccgccgccggtgcgggtgctccgctaccggctcctctccgttctgtgctctcttctgctctcggctccccaccccctctcccttccctcctctccccttgcctcccctcctctgcagcgcctgcattattttctgcccgcaggctcggcttgcactgctgctgcagcccggggaggtggctgggtgggtggggaggagactgtgcaagttgtaggggagggggtgccctcttcttccccgctcccttcccccgccaactccttcccctccttctccccctttcccctccccgcccccaccttcttcctcctttcggaaggactggtaacttgtcgtgcggagcgaacggcggcggcggcggcggcggcggcaccatccaggcgggcaccatgggcacgtccgcgctctgggcgctctggctgctgctcgcgctgtgctgggcgccccgggagagcggcgccaccggaaccgggagaaaagccaaatgtgaaccctcccaattccagtgcacaaatggtcgctgtattacgctgttgtggaaatgtgatggggatgaagactgtgttgacggcagtgatgaaaagaactgtgtaaagaagacgtgtgctgaatctgacttcgtgtgcaacaatggccagtgtgttcccagccgatggaagtgtgatggagatcctgactgcgaagatggttcagatgaaagcccagaacagtgccatatgagaacatgccgcatacatgaaatcagctgtggcgcccattctactcagtgtatcccagtgtcctggagatgtgatggtgaaaatgattgtgacagtggagaagatgaagaaaactgtggcaatataacatgtagtcccgacgagttcacctgctccagtggccgctgcatctccaggaactttgtatgcaatggccaggatgactgcagcgatggcagtgatgagctggactgtgccccgccaacctgtggcgcccatgagttccagtgcagcacctcctcctgcatccccatcagctgggtatgcgacgatgatgcagactgctccgaccaatctgatgagtccctggagcagtgtggccgtcagccagtcatacacaccaagtgtccagccagcgaaatccagtgcggctctggcgagtgcatccataagaagtggcgatgtgatggggaccctgactgcaaggatggcagtgatgaggtcaactgtccctctcgaacttgccgacctgaccaatttgaatgtgaggatggcagctgcatccatggcagcaggcagtgtaatggtatccgagactgtgtcgatggttccgatgaagtcaactgcaaaaatgtcaatcagtgcttgggccctggaaaattcaagtgcagaagtggagaatgcatagatatcagcaaagtatgtaaccaggagcaggactgcagggactggagtgatgagcccctgaaagagtgtcatataaacgaatgcttggtaaataatggtggatgttctcatatctgcaaagacctagttataggctacgagtgtgactgtgcagctgggtttgaactgatagataggaaaacctgtggagatattgatgaatgccaaaatccaggaatctgcagtcaaatttgtatcaacttaaaaggcggttacaagtgtgaatgtagtcgtggctatcaaatggatcttgctactggcgtgtgcaaggcagtaggcaaagagccaagtctgatcttcactaatcgaagagacatcaggaagattggcttagagaggaaagaatatatccaactagttgaacagctaagaaacactgtggctctcgatgctgacattgctgcccagaaactattctgggccgatctaagccaaaaggctatcttcagtgcctcaattgatgacaaggttggtagacatgttaaaatgatcgacaatgtctataatcctgcagccattgctgttgattgggtgtacaagaccatctactggactgatgcggcttctaagactatttcagtagctaccctagatggaaccaagaggaagttcctgtttaactctgacttgcgagagcctgcctccatagctgtggacccactgtctggctttgtttactggtcagactggggtgaaccagctaaaatagaaaaagcaggaatgaatggattcgatagacgtccactggtgacagcggatatccagtggcctaacggaattacacttgaccttataaaaagtcgcctctattggcttgattctaagttgcacatgttatccagcgtggacttgaatggccaagatcgtaggatagtactaaagtctctggagttcctagctcatcctcttgcactaacaatatttgaggatcgtgtctactggatagatggggaaaatgaagcagtctatggtgccaataaattcactggatcagagctagccactctagtcaacaacctgaatgatgcccaagacatcattgtctatcatgaacttgtacagccatcaggtaaaaattggtgtgaagaagacatggagaatggaggatgtgaatacctatgcctgccagcaccacagattaatgatcactctccaaaatatacctgttcctgtcccagtgggtacaatgtagaggaaaatggccgagactgtcaaagtactgcaactactgtgacttacagtgagacaaaagatacgaacacaacagaaatttcagcaactagtggactagttcctggagggatcaatgtgaccacagcagtatcagaggtcagtgttcccccaaaagggacttctgccgcatgggccattcttcctctcttgctcttagtgatggcagcagtaggtggctacttgatgtggcggaattggcaacacaagaacatgaaaagcatgaactttgacaatcctgtgtacttgaaaaccactgaagaggacctctccatagacattggtagacacagtgcttctgttggacacacgtacccagcaatatcagttgtaagcacagatgatgatctagcttgacttctgtgacaaatgttgacctttgaggtctaaacaaataatacccccgtcggaatggtaaccgagccagcagctgaagtctctttttcttcctctcggctggaagaacatcaagatacctttgcgtggatcaagcttgtgtacttgaccgtttttatattacttttgtaaatattcttgtccacattctacttcagctttggatgtggttaccgagtatctgtaacccttgaatttctagacagtattgccacctctggccaaatatgcactttccctagaaagccatattccagcagtgaaacttgtgctatagtgtataccacctgtacatacattgtataggccatctgtaaatatcccagagaacaatcactattcttaagcactttgaaaatatttctatgtaaattattgtaaactttttcaatggttgggacaatggcaataggacaaaacgggttactaagatgaaattgccaaaaaaatttataaactaattttgtacgtatgaatgatatctttgacctcaatggaggtttgcaaagactgagtgttcaaactactgtacattttttttcaagtgctaaaaaattaaaccaagcagcttaaccatgaaaaaaaaaa

SEQ ID NO: 275 - DNA, 8191 bp, Homo sapiens
tttgcttgcaacactggcacctctgccctgcaccccgggagtgagcagtgagtgaggctcgggtctgggcgctggctccgaatcttcgggctgggagagactccaccatctgggggcggcctgggggagcagccttagtgtcttcctgctgatgcaatccgctaggtcgcgagtctccgccgcgagagggccggtctgcaatccagcccgccacgtgtactcgccgccgcctcgggcactgccccaggtcttgctgcagccgggaccgcgctctgcagccgcagacccggtccacacggccaggggctacgacccttgggatctgccctccgctcagctcgagcttccctcgtggccgacggaacaatgaaggattgcagtaacggatgctccgcagagtgtaccggagaaggaggatcaaaagaggtggtggggacttttaaggctaaagacctaatagtcacaccagctaccattttaaaggaaaaaccagaccccaataatctggtttttggaactgtgttcacggatcatatgctgacggtggagtggtcctcagagtttggatgggagaaacctcatatcaagcctcttcagaacctgtcattgcaccctggctcatcagctttgcactatgcagtggaattatttgaaggattgaaggcatttcgaggagtagataataaaattcgactgtttcagccaaacctcaacatggatagaatgtatcgctctgctgtgagggcaactctgccggtatttgacaaagaagagctcttagagtgtattcaacagcttgtgaaattggatcaagaatgggtcccatattcaacatctgctagtctgtatattcgtcctacattcattggaactgagccttctcttggagtcaagaagcctaccaaagccctgctctttgtactcttgagcccagtgggaccttatttttcaagtggaacctttaatccagtgtccctgtgggccaatcccaagtatgtaagagcctggaaaggtggaactggggactgcaagatgggagggaattacggctcatctctttttgcccaatgtgaagcagtagataatgggtgtcagcaggtcctgtggctctatggagaggaccatcagatcactgaagtgggaactatgaatctttttctttactggataaatgaagatggagaagaagaactggcaactcctccactagatggcatcattcttccaggagtgacaaggcggtgcattctggacctggcacatcagtggggtgaatttaaggtgtcagagagatacctcaccatggatgacttgacaacagccctggaggggaacagagtgagagagatgtttggctctggtacagcctgtgttgtttgcccagtttctgatatactgtacaaaggcgagacaatacacattccaactatggagaatggtcctaagctggcaagccgcatcttgagcaaattaactgatatccagtatggaagagaagagagcgactggacaattgtgctatcctgaatggaaaatagaggatacaatggaaaatagaggataccaactgtatgctactgggacagactgttgcatttgaattgtgatagatttctttggctacctgtgcataatgtagtttgtagtatcaatgtgttacaagagtgattgtttcttcatgccagagaaaatgaattgcaatcatcaaatggtgtttcataacttggtagtagtaacttaccttaccttacctagaaaaacattaatgtaagccatataacatgggattttcctcaatgattttagtgcctccttttgtacttcactcagatactaaatagtagtttattctttaatataagttacattctgctcctcaaacaaatgcaattttttgtgtgtgtttgaaagctaatttgagaaaatttcataggttacatttcctgcagcctatctttatccacagaaagtgttttcttttttttaaatcaagacttttaaaactggatttcctcccatcactgttttttgaaggtcctccaagtccgtgttaaggtaaatatctgttttcttcctgatgtcacagcctgagcatactctgtgcattaggaagacctgagtgcatttcccaccattgtcctttccacattatgttgtagctggctggctgtcaggcgactacaagactgagggtcttgtgccttatagatctttgtatcccccatggctgacatatagtaggtactcagtaaatggttttataatgaatcagtgaacattttgcttctatagaagtgtaccttctttgtttctatattatgaaacctctttattagaatttgtgattgattctgacagtgtatagatttaccttatattgtctttattttccatgagctactaagtcattagagatactctgaagcatagttagtttaggaaatcacttcatattgattgtattagaattatcttggaattgaagatatatccctagagcaggggaccccaacccccaggccatgggccacacagcaggaagaggtgagtggtgggccattgaggagcttcatctgtatttatggctacttcccatcactcgaattaccacctgaactccacctcttgtcagctcagtggcagcattagattctcataggagcacaaatcctattgtgaactctgcatgcaagggatctaggctatgcgctccttatgagaatctaatgcttgatgacctgaggtgtaacagtttcatcctgaaaccacccttcaccctgcagtctgtggaaaaattgtcttccacaaaactggtccctggtgccaaaaatgttggggaccactgctctagagagaggtcatgatatcataccaaccaaatggaaatgacaaatgttttatgtcaagtgttaattgcagaaataaatcttttttttttttttttggtagaaaacaaagaggcatactctgatttttatactctgtttttgcaggtgctcttttctttgaatggagatttgatgagcaagtggttaggatgcagggagagctactatgggtgatattttccttgtttaggagctgtgagttaaaattgtatcctttgtggtttatctaaggaaagtcaaatcttgacagaaaacatttttccttggaaggtcaactctcagacattgtattttggtttccctcagtcctcataacttccttcttgctgaacatattttattctcttttcagagaaggaaaataaaaaggattctaaaagtttgatgcattggaaaaatttccttgaggcatttagcaacacatagaaaatgggctttgattcttttccaaaacttttagccatagggtcttttatagacagggatagtaaaatgaaaattgagaaatataagatgaaaaggaatgataaaaatatcttttagggggcttttaattggtgatctgaaatcttgggagaagctgttcttttcaggcctgaggtgctcttgactgtcgcctgcgcactgtgtaccccgagcaacattctaagggtgtgctttcgccttggctaactcctttgacctcattcttcatatagtagtctaggaaaaagttgcaggtaatttaaactgtctagtggtacatagtaactaaatttctattcctatgagaaatgagaattatttatttgccatcaacacattttatactttgcatctccaaatttattgtggcgagacttgtccattgtgaaagttagagaacattatgtttgtatcatttctttcataaaacctcaagagcatttttaagcccttttcatcagacccagtgaaaactaaggatagatgtttaaaaactggaggtctcctgataaggagaacacaatccaccattgtcatttaagtaataagacaggaaattgaccttgacgctttcttgttaaatagatttaacaggaacatctgcacatcttttttccttgtgcactatttgtttaattgcagtggattaatacagcaagagtgccacattataactaggcaattatccattcttcaagacttagttattgtcacactaattgatcgtttaaggcataagatggtctagcattaggaacatgtgaagctaatctgctcaaaaagatcaacaaattaatattgttgctgatatttgcataattggctgcaattatttaatgtttaattgggttgatcaaatgagattcagcaattcacaagtgcattaatataaacagaactggtggcacttaaaatgataatgattaacttatattgcatgttctcttcctttcacttttttcagtttctacatttcagaccgagcttgtcagcttttttgaaaacacatcagtagaaaccaagattttaaaatgaagtgtcaagacaaaggcaaaacctgagcagttcctaaaaagatttgctgttagaaattttctttgtggcagtcatttattaaggattcaactcgtgatacaccaaaagaagagttgacttcagagatgtgttccatgctctctagcacaggaatgaataaatttataacacctgctttagcctttgttttcaaaagcacaaaggaaaagtgaaagggaaagagaaacaagtgactgagaagtcttgttaaggaatcaggttttttctacctggtaaacattctctattcttttctcaaaagattgctgtaagaaaaaatgtaagacaaaaaaaaaaaaaaaaaacaaacagaggcagaggcaggcagtagcaagaaagcagagcgtaacatcagctagatggtaacatgcaatgtcagctctcttgaagacatgggaaacctaagttacaccttgggttaaaattcttcaccatattagttttgttgcttcataaaatttacctaagcaagtggtcttgcttgcctcaaatccaagcagtcttgaacacttggaggcaattaatgagtatatcttagtcaaaagaattgttggagctttttattaaagctacagtttcagttctgcttttggggaattgtgctatgaaagcagctgccaaaataagctcatttattttcttcaatcccactcagtgctcagtcactatattctgtttcctttttttttttcaagttgcatatttggtttccccttatgattgggaaagatgaattttcagcagaaaacattgtttgttcactttcaaagagtgatagtttctaaaacatttagagcaataaatattcatcagaggtaccaagtaagccggcagaagagttaagggttagagaaatcccttatttcatgtcttgactctaaaattatcaaagtacttttccttgtaatgtggatttcttcttatgcggatatgcaaaaacttcagttatacgtagtaatgctagcaggtaattttagtagacattttataacaactgtcactttgtttcgccacatgtagagtttgttcagctattttccagatatctccccacaaaaggaggcaaagggtaccagcttttcaatgagcattacctattacttggcaaagatgatgaagactctattaatagttcatttgataaatgttgacataaccaacaatagagattaggaagttagttttaagaaatcaatggcatatagacattaccctcatggagtttgtattctactacttgaactgattgtagctataaaagcatagttagatagctgaatagttagatcataagcaaagaaggccagaacacatctcttatcaagaaatcaatgaatagtttatctcatttttaaagcaactttatccttctttaattccttcctttcttctagtgcaaaactacttaataaggttggtgtttaggttagtgttcacaccattcctcatctggtgtgaattaccttctctttctttactatttactaccaacctagtacatgtgttgactgaattcttttcaaacaatgttgagttatcatggtgcacctaataaattaacaccacagattacagcatccttgctgattttctcagcaaagccagattagatggaaataaacaaagaaaatgatcctagagtgaatttttctagaaaatatctattatgaaccatgctgtttaaagtattagcttgaaggtgatggatccagctattcagaaaataactttcatataaccatgattttgcacagtatgaggtcttaaatgtgtggaaagagataaattttttatcattaccacaaaccccttttaaagattcaaaggtggaagaaagtgatttattttttctcttcagcatacatatataaaagacttgtcagatgtttaatttggggaggttgataatgaaacatatcaacagagtatagtagttatagtagtgtttgtgggtaaataatttcctggggtcagacatatataaacatatttgcttcaaaatgataaaggcatgaaatcagtcttaaaaattgaaatgggggtgatgggggagaaaaagaagaacaaatttgaagtgccctttcaaatctgctggatacaagtattgaagttttaagtcatcttattctgtctgaaagtgtatttttcattctacaatagacccaatcaacaagacgtataacttgagttgcatgatgttcagtttatgtaatctactgttgggatggtaagaattgatgtaggctgtggtgtaagaatgaattaaaatatagtttcactggcttttctctacatatccactatcacaatggctaggtttcctgttgctcactattggattctggagaaaaatttaatgaaagatgatatcagaggaagaataagtggaggtagagaagaaaggaatgatagaggaggggaaaaaaacaaaacatatttttgtgttatccaaaggagctttttccttattctgtcaagcattgagatcttcttcagctttcaatgtagttgctaaatacaaataatgctactaggtagtgactaaatatagcaaacacttcatcagatattagaattaggtcacactattgaggttataatctgaaggttgtgttacatagaaaccactttagattattatcaacttggactaggctttattttataatagcatagtaagtaatatctattgtgtcatttcttcaaccattttattctaagatccatgaagcttcttgaggccaaataaaataataagtttagacaagaagtagattgtgacttttttcccttagagatactatttactatctcctatcctgataggtggaaggtttactgaattggaaattggttgactattagtttttaactaaaatgtgcaataacacattgcagtttcctcaaactagtttcctatgatcattaaactcattctcagggttaagaaaggaatgtaaatttctgcctcaatttgtacttcatcaataagtttttgaagagtgcagatttttagtcaggtcttaaaaataaactcacaaatctggatgcatttctaaattctgcaaatgtttcctggggtgacttaacaaggaataatcccacaatatacctagctacctaatacatggagctggggctcaacccactgtttttaaggatttgcgcttacttgtggctgaggaaaaataagtagttcgaggaagtagtttttaaatgtgagcttatagatagaaacagaatatcaacttaattatgaaattgttagaacctgttctcttgtatctgaatctgattgcaattactattgtactgatagactccagccattgcaagtctcagatatcttagctgtgtagtgattcttgaaattctttttaagaaaaattgagtagaaagaaataaaccctttgtaaatgaggcttggcttttgtgaaagatcatccgcaggctatgttaaaaggattttagctcactaaaagtgtaataatggaaatgtggaaaatatcgtaggtaaaggaaactacctcatgctctgaaggttttgtagaagcacaattaaacatctaaaatggctttgttacaccagagccatctggtgtgaagaactctatatttgtatgttgagagggcatggaataattgtattttgctggcaatagacacattctttattatttgcagattcctcatcaaatctgtaattatgcacagtttctgttatcaataaaacaaaagaatcctgtttgtgtggtttcatgaaa

SEQ ID NO: 276 - DNA, 3084 bp, Homo sapiens
aagatctaaaaacggacatctccaccgtgggtggctcctttttctttttctttttttcccacccttcaggaagtggacgtttcgttatcttctgatccttgcaccttcttttggggaaacggggcccttctgcccagatcccctctcttttctcggaaaacaaactactaagtcggcatccggggtaactacagtggagagggtttccgcggagacgcgccgccggaccctcctctgcactttggggaggcgtgctccctccagaaccggcgttctccgcgcgcaaatcccggcgacgcggggtcgcggggtggccgccggggcagcctcgtctagcgcgcgccgcgcagacgcccccggagtcgccagctaccgcagccctcgccgcccagtgcccttcggcctcggggcgggcgcctgcgtcggtctccgcgaagcgggaaagcgcggcggccgccgggattcgggcgccgcggcagctgctccggctgccggccggcggccccgcgctcgcccgccccgcttccgcccgctgtcctgctgcacgaacccttccaactctcctttcctcccccacccttgagttacccctctgtctttcctgctgttgcgcgggtgctcccacagcggagcggagattacagagccgccgggatgccccaactctccggaggaggtggcggcggcgggggggacccggaactctgcgccacggacgagatgatccccttcaaggacgagggcgatcctcagaaggaaaagatcttcgccgagatcagtcatcccgaagaggaaggcgatttagctgacatcaagtcttccttggtgaacgagtctgaaatcatcccggccagcaacggacacgaggtggccagacaagcacaaacctctcaggagccctaccacgacaaggccagagaacaccccgatgacggaaagcatccagatggaggcctctacaacaagggaccctcctactcgagttattccgggtacataatgatgccaaatatgaataacgacccatacatgtcaaatggatctctttctccacccatcccgagaacatcaaataaagtgcccgtggtgcagccatcccatgcggtccatcctctcacccccctcatcacttacagtgacgagcacttttctccaggatcacacccgtcacacatcccatcagatgtcaactccaaacaaggcatgtccagacatcctccagctcctgatatccctactttttatcccttgtctccgggtggtgttggacagatcaccccacctcttggctggcaaggtcagcctgtatatcccatcacgggtggattcaggcaaccctacccatcctcactgtcagtcgacacttccatgtccaggttttcccatcatatgattcccggtcctcctggtccccacacaactggcatccctcatccagctattgtaacacctcaggtcaaacaggaacatccccacactgacagtgacctaatgcacgtgaagcctcagcatgaacagagaaaggagcaggagccaaaaagacctcacattaagaagcctctgaatgcttttatgttatacatgaaagaaatgagagcgaatgtcgttgctgagtgtactctaaaagaaagtgcagctatcaaccagattcttggcagaaggtggcatgccctctcccgtgaagagcaggctaaatattatgaattagcacggaaagaaagacagctacatatgcagctttatccaggctggtctgcaagagacaattatggtaagaaaaagaagaggaagagagagaaactacaggaatctgcatcaggtacaggtccaagaatgacagctgcctacatctgaaacatggtggaaaacgaagctcattcccaacgtgcaaagccaaggcagcgaccccaggacctcttctggagatggaagcttgttgaaaacccagactgtctccacggcctgcccagtcgacgccaaaggaacactgacatcaattttaccctgaggtcactgctagagacgctgatccataaagacaatcactgccaacccctctttcgtctactgcaagagccaagttccaaaataaagcataaaaaggttttttaaaaggaaatgtaaaagcacatgagaatgctagcaggctgtggggcagctgagcagcttttctccccccatatctgcgtgcacttcccagagcatcttgcatccaaacctgtaacctttcggcaaggacggtaacttggctgcatttgcctgtcatgcgcaactggagccagcaaccagctatccatcagcaccccagtggaggagttcatggaagagttccctctttgtttctgcttcatttttctttcttttcttttctcctaaagcttttatttaacagtgcaaaaggatcgtttttttttgcttttttaaacttgaatttttttaatttacactttttagttttaattttcttgtatattttgctagctatgagcttttaaataaaattgaaagttctggaaaagtttgaaataatgacataaaaagaagccttctttttctgagacagcttgtctggtaagtggcttctctgtgaattgcctgtaacacatagtggcttctccgcccttgtaaggtgttcagtagagctaaataaatgtaatagccaaaccccactctgttggtagcaattggcagccctatttcagtttattttttcttctgttttcttcttttctttttttaaacagtaaaccttaacagatgcgttcagcagactggtttgcagtgaattttcatttctttccttatcacccccttgttgtaaaaagcccagcacttgaattgttattactttaaatgttctgtatttgtatctgtttttattagccaattagtgggattttatgccagttgttaaaatgagcattgatgtacccattttttaaaaaagcaagcacagcctttgcccaaaactgtcatcctaacgtttgtcattccagtttgagttaatgtgctgagcatttttttaaaagaagctttgtaataaaacatttttaaaaattgtcatttaaaaaaaaaaaaaaaaaa

SEQ ID NO: 277 - DNA, 4670 bp, Homo sapiens
gcactcgctggaaagcggctccgagccaggggctattgcaaagccagggtgcgctaccggacggagaggggagagccctgagcagagtgagcaacatcgcagccaaggcggaggccgaagaggggcgccaggcaccaatctccgcgttgcctcagccccggaggcgccccagagcgcttcttgtcccagcagagccactctgcctgcgcctgcctctcagtgtctccaactttgcgctggaagaaaaacttcccgcgcgccggcagaactgcagcgcctccttttagtgactccgggagcttcggctgtagccggctctgcgcgcccttccaacgaataatagaaattgttaattttaacaatccagagcaggccaacgaggctttgctctcccgacccgaactaaaggtccctcgctccgtgcgctgctacgagcggtgtctcctggggctccaatgcagcgagctgtgcccgaggggttcggaaggcgcaagctgggcagcgacatggggaacgcggagcgggctccggggtctcggagctttgggcccgtacccacgctgctgctgctcgccgcggcgctactggccgtgtcggacgcactcgggcgcccctccgaggaggacgaggagctagtggtgccggagctggagcgcgccccgggacacgggaccacgcgcctccgcctgcacgcctttgaccagcagctggatctggagctgcggcccgacagcagctttttggcgcccggcttcacgctccagaacgtggggcgcaaatccgggtccgagacgccgcttccggaaaccgacctggcgcactgcttctactccggcaccgtgaatggcgatcccagctcggctgccgccctcagcctctgcgagggcgtgcgcggcgccttctacctgctgggggaggcgtatttcatccagccgctgcccgccgccagcgagcgcctcgccaccgccgccccaggggagaagccgccggcaccactacagttccacctcctgcggcggaatcggcagggcgacgtcggcggcacgtgcggggtcgtggacgacgagccccggccgactgggaaagcggagaccgaagacgaggacgaagggactgagggcgaggacgaaggggctcagtggtcgccgcaggacccggcactgcaaggcgtaggacagcccacaggaactggaagcataagaaagaagcgatttgtgtccagtcaccgctatgtggaaaccatgcttgtggcagaccagtcgatggcagaattccacggcagtggtctaaagcattaccttctcacgttgttttcggtggcagccagattgtacaaacaccccagcattcgtaattcagttagcctggtggtggtgaagatcttggtcatccacgatgaacagaaggggccggaagtgacctccaatgctgccctcactctgcggaacttttgcaactggcagaagcagcacaacccacccagtgaccgggatgcagagcactatgacacagcaattcttttcaccagacaggacttgtgtgggtcccagacatgtgatactcttgggatggctgatgttggaactgtgtgtgatccgagcagaagctgctccgtcatagaagatgatggtttacaagctgccttcaccacagcccatgaattaggccacgtgtttaacatgccacatgatgatgcaaagcagtgtgccagccttaatggtgtgaaccaggattcccacatgatggcgtcaatgctttccaacctggaccacagccagccttggtctccttgcagtgcctacatgattacatcatttctggataatggtcatggggaatgtttgatggacaagcctcagaatcccatacagctcccaggcgatctccctggcacctcgtacgatgccaaccggcagtgccagtttacatttggggaggactccaaacactgccccgatgcagccagcacatgtagcaccttgtggtgtaccggcacctctggtggggtgctggtgtgtcaaaccaaacacttcccgtgggcggatggcaccagctgtggagaagggaaatggtgtatcaacggcaagtgtgtgaacaaaaccgacagaaagcattttgatacgccttttcatggaagctggggaatgtgggggccttggggagactgttcgagaacgtgcggtggaggagtccagtacacgatgagggaatgtgacaacccagtcccaaagaatggagggaagtactgtgaaggcaaacgagtgcgctacagatcctgtaaccttgaggactgtccagacaataatggaaaaacctttagagaggaacaatgtgaagcacacaacgagttttcaaaagcttcctttgggagtgggcctgcggtggaatggattcccaagtacgctggcgtctcaccaaaggacaggtgcaagctcatctgccaagccaaaggcattggctacttcttcgttttgcagcccaaggttgtagatggtactccatgtagcccagattccacctctgtctgtgtgcaaggacagtgtgtaaaagctggttgtgatcgcatcatagactccaaaaagaagtttgataaatgtggtgtttgcgggggaaatggatctacttgtaaaaaaatatcaggatcagttactagtgcaaaacctggatatcatgatatcatcacaattccaactggagccaccaacatcgaagtgaaacagcggaaccagaggggatccaggaacaatggcagctttcttgccatcaaagctgctgatggcacatatattcttaatggtgactacactttgtccaccttagagcaagacattatgtacaaaggtgttgtcttgaggtacagcggctcctctgcggcattggaaagaattcgcagctttagccctctcaaagagcccttgaccatccaggttcttactgtgggcaatgcccttcgacctaaaattaaatacacctacttcgtaaagaagaagaaggaatctttcaatgctatccccactttttcagcatgggtcattgaagagtggggcgaatgttctaagtcatgtgaattgggttggcagagaagactggtagaatgccgagacattaatggacagcctgcttccgagtgtgcaaaggaagtgaagccagccagcaccagaccttgtgcagaccatccctgcccccagtggcagctgggggagtggtcatcatgttctaagacctgtgggaagggttacaaaaaaagaagcttgaagtgtctgtcccatgatggaggggtgttatctcatgagagctgtgatcctttaaagaaacctaaacatttcatagacttttgcacaatggcagaatgcagttaagtggtttaagtggtgttagctttgagggcaaggcaaagtgaggaagggctggtgcagggaaagcaagaaggctggagggatccagcgtatcttgccagtaaccagtgaggtgtatcagtaaggtgggattatgggggtagatagaaaaggagttgaatcatcagagtaaactgccagttgcaaatttgataggatagttagtgaggattattaacctctgagcagtgatatagcataataaagccccgggcattattattattatttcttttgttacatctattacaagtttagaaaaaacaaagcaattgtcaaaaaaagttagaactattacaacccctgtttcctggtacttatcaaatacttagtatcatgggggttgggaaatgaaaagtaggagaaaagtgagattttactaagacctgttttactttacctcactaacaatggggggagaaaggagtacaaataggatctttgaccagcactgtttatggctgctatggtttcagagaatgtttatacattatttctaccgagaattaaaacttcagattgttcaacatgagagaaaggctcagcaacgtgaaataacgcaaatggcttcctctttccttttttggaccatctcagtctttatttgtgtaattcattttgaggaaaaaacaactccatgtatttattcaagtgcattaaagtctacaatggaaaaaaagcagtgaagcattagatgctggtaaaagctagaggagacacaatgagcttagtacctccaacttcctttctttcctaccatgtaaccctgctttgggaatatggatgtaaagaagtaacttgtgtctcatgaaaatcagtacaatcacacaaggaggatgaaacgccggaacaaaaatgaggtgtgtagaacagggtcccacaggtttggggacattgagatcacttgtcttgtggtggggaggctgctgaggggtagcaggtccatctccagcagctggtccaacagtcgtatcctggtgaatgtctgttcagctcttctgtgagaatatgattttttccatatgtatatagtaaaatatgttactataaattacatgtactttataagtattggtttgggtgttccttccaagaaggactatagttagtaataaatgcctataataacatatttatttttatacatttatttctaatgaaaaaaacttttaaattatatcgcttttgtggaagtgcatataaaatagagtatttatacaatatatgttactagaaataaaagaacacttttggaaaaaaaaaaaaaaaaaaaaa

SEQ ID NO: 278 - DNA, 2039 bp, Homo sapiens
cctttgtcattctagctgcctgctgcctccgcagcgtccccccagctctccctgtgctaactgcctgcaccttggacagagcgggtgcgcaaatcagaaggattagttgggacctgccttggcgaccccatggcatcccccagaaccgtaactattgtggccctctcagtggccctgggactcttctttgttttcatggggactatcaagctgacccccaggctcagcaaggatgcctacagtgagatgaaacgtgcttacaagagctatgttcgagccctccctctgctgaagaaaatggggatcaattccattctcctccgaaaaagcattggtgcccttgaagtggcctgtggcatcgtcatgacccttgtgcctgggcgtcccaaagatgtggccaacttcttcctactgttgctggtgttggctgtgctcttcttccaccagctggtcggtgatcctctcaaacgctacgcccatgctctggtgtttggaatcctgctcacttgccgcctgctgattgctcgcaagcccgaagaccggtcttctgagaagaagcctttgccagggaatgctgaggagcaaccctccttatatgagaaggcccctcagggcaaagtgaaggtgtcatagaaaagtggaagtgcaaagagtggaccttccaggcagttgcgtccatgacaccaggaagatgtcagtgtgtgtttttcatttgatttatttatcttggggaaagtgaaaaatgtaatctgcaagttaatgaccctattggcttgtgtacatctatatgctaaaatgacttccccacattgacatttgtgcgccacctttaatcactctggggcaactctcacatcttgctgcatgtacatgtatacggctactattgaagtgtaattgtgagatggactccaacaagcatgtgactgtgagattgtgtgtgggaaaatgtatttaactactctgtgtgtgtgtgtgtgtgtgtgtgcgcacgcgcgcacgcgcacacactcacgcacacacaagcagagaaggcgctgatcttgaactaatcctgcacaggcatccttccctttatagattgattccagcaaaggcggaataaaacaaatttcctatgaagagaatcctgatatgaaacaagtcatgtagtctcatggccgggaatctctccacagatactaacaacttaaacttactactttaggagaaaaaaaaaaacattcaatttcggacactgagttatatatgaaattaattaggctctagtccaacagttgtttacattttaaatagtccatattgaatttaattaaaacaagggatgcatgcagtcaaattgatagtttaattcttcaagtgataatataggaagtttcaccttgcctttgtccaagccccacctattaaaaccctttactcacagtttgaaactgaagcagtaaacttgtttccagacatctttttcagattgtcttaagcccaaagttgcctcacttccactattctcagcagccaaccaggatttggcagctgctccactgttacggttgagggaacagggatcagccctgttagaagtctgtgagcctcaaactctacctgttctctgcaatcatccaaaatttgaaaaagaagctatatccagtgtttcactgccaaacagattcactactcttactgattcttcactgagctttgctagtataagcagagttccaagtctcccctagggttgtctctacatttctttatcattccagtgggtagggtttagctgggggaaggacatttcataagggttagttggactgagcagtatggacatttgcttttttcattacgtactgttgtttttccttgttaggtgtgctttggtggttttaatattattgtgccagggatggggaaatggggggggttgtgtgggaagagtacttattattgtgttttcttcagtgtaattgttcttggtaattgatacctctctgttttatttctctcattctttcaaaataaaactttttgaaatttggagg

SEQ ID NO: 279 - DNA, 1303 bp, Homo sapiens
agcagcgggcgcgctcataaagggcacagccgagggtacgtggatcgcggtgcggagactgaggttagaaggcacaggtggcgagatgagccgggtaccagcgttcctgagcgcggccgaggtggaggaacacctccgcagctccagcctcctcatcccgcctctagagacggccctggccaacttctccagcggtcccgaaggaggggtcatgcagcccgtgcgcaccgtggtgccggtgaccaagcacaggggctacctgggggtcatgcccgcctacagtgctgcagaggatgcactgaccaccaagttggtcaccttctacgaggaccgcggcatcacctcggtcgtcccttcccaccaggctactgtgctactctttgagcccagcaatggcaccctgctggcggtcatggatggaaatgtcataactgcaaagagaacagctgcagtttctgccattgccaccaagtttctgaaacctcccagcagtgaagtgctgtgcatccttggggctggggtccaggcctacagccattatgagatcttcacagagcagttctcctttaaggaggtgaggatatggaaccgcaccaaagaaaatgcagagaagtttgcagacacagtgcaaggagaggtacgggtctgttcttcggtccaggaggctgtggcaggtgcagatgtgatcatcacagtcaccctggcaacagagcccattttgtttggtgaatgggtgaagccaggggctcacatcaatgctgttggagccagcagacctgactggagagaactggatgatgagctcatgaaagaagctgtgctgtacgtggattcccaggaggctgccctgaaggagtctggagatgtcctgctgtcaggggccgagatctttgctgagctgggagaagtgattaagggagtgaaaccagcccactgtgagaagaccaccgtgttcaagtctttgggaatggcagtggaagacacagttgcagccaaactcatctatgattcctggtcatctggtaaataaaacaaaggaacttgatgttgagatggatgcttgaggaatattgctgctggttctcataatttctagagtaaatgagggagtccagtccccagtgaactctccttttgtgcttatcatgttttaccttaaatgctgagatcctcatttatgtttgtagttggaaagcaaagctaggtagccatttcttctgttctaccaagttataatagcattcatttccctttatatttccctgaaataaagcacattccaattgtgcaaaaaaaaaaaaaa

SEQ ID NO: 280 - DNA, 4122 bp, Homo sapiens
aggaggcgacagctgccagccgaggaggcgcggcggagaggggactgcggtcagctgcgtccacttggggctgtgcggcggtcccgcgcccggcgatgttcccgggcactccctgagtagcggcagcttatcccccgcccgctagcccgccctggtccccggctcgctcgctggctggcgcggccccggccccgctctgcgtcggccccgccgcggtggaggcgcgcgagggggacgcggccggggatgagcggattgcgggtgaactcgccgccggggccccgcgaagccgtgagccgctgcttttctccgagtcgccgccctgcccttggatttgagatcatgtccatccacatcgtggcgctggggaacgagggggacacattccaccaggacaaccagccgtcggggcttatccgcacttacctggggagaagccctctggtctccggggacgagagcagcttgttgctgaacgcggccagcacggtcgcgcgtccggtgttcaccgagtatcaggccagtgcgtttgggaatgtcaagctggtggtccacgactgtcccgtctgggacatatttgacagtgattggtacacttctcgaaatctaattgggggcgctgacatcattgtgatcaaatacaacgttaatgacaagttttcattccatgaagtaaaggataattatattccagtgataaaaagagcattaaattcagttccagtaattattgctgctgttggtaccagacaaaatgaagagttaccttgtacatgcccactatgtacctcagacagagggagctgtgttagtacaactgaagggatccaacttgcaaaagaactaggagcaacctatcttgaactccacagccttgatgacttctacataggaaagtattttggaggagtgttggagtattttatgattcaagccttaaatcagaagacaagtgaaaaaatgaagaaaagaaaaatgagcaactcctttcatggaattagaccacctcaacttgaacaaccagaaaaaatgcctgtcttaaaggctgaagcgtcacattataactctgacttaaataacttgctgttctgctgccagtgtgtggacgtggtattttataaccccgatttaaagaaagttgtagaggcccacaagatcgttctctgcgctgtaagccatgttttcatgctgcttttcaatgtgaagagtcccactgacattcaggattccagtatcatccgaactacccaggatctttttgctataaacagagatactgcatttccaggtgctagccatgaatcttcaggcaacccaccattacgagtcattgttaaagacgccctcttctgttcttgtttatcagacatccttcgcttcatttattcaggtgcttttcagtgggaagaattggaagaagatatcaggaagaagttgaaagattctggggatgtttcaaatgtaatcgagaaagttaaatgcattttaaaaacaccaggaaagattaattgcctaaggaattgcaaaacctatcaagccagaaaacctttgtggttttataacacttccctcaagtttttccttaataagccgatgcttgccgatgttgtcttcgaaattcaaggtacgacagtgccagcccacagggccatcctggtggcccgttgtgaagtgatggcagccatgtttaatggtaattacatggaagcaaagagtgtcctgattcccgtttatggtgtttccaaagagactttcttgtcatttttagaatacctgtacacagactcctgctgcccagctggcatattccaggccatgtgtctcctgatctgtgccgagatgtaccaagtgtccagactgcagcacatctgtgagctgttcatcattacccagctgcagagcatgccaagcagggaactggcatccatgaaccttgatatagttgacctgcttaaaaaggccaagtttcaccactctgattgcctttcaacctggctacttcatttcattgctactaactacctcatcttcagtcaaaagcctgaatttcaggatctttcagtggaagaacgcagttttgttgaaaagcacagatggccgtcgaatatgtacttgaagcagcttgcggaatacaggaagtatattcactcccggaaatgtcgttgcttagtaatgtaacctggagcttttatacactacatttcttttttattattatgaagaatgggatacctccaggttccagtaaaattcttctgaccgaaaccaatgtgggtgttagaaaaattaccatatagcttaatatgtttattagttctctttggaaaaaaactaccactgtggtcttaaaagggaacaaaatataccataggctaaaactaaggctttcactctagaatgcaaagctgttttgcagctgttttcccttaaagatgtcctgttgctttagtgatatttagacccctctcagttaagaaatgcttagattaaaaaaaaaaaattacgtaggattaatacagaaatttaatcatgtctgattaattgctctattaaaataaggggcatttaaagacccagcataaccatttgtataatgagaaatctaggggaaaaccaatcagtccaacatgagattttaggaatagaaatttgccggccatttggaaagtgaaatgccacttagttctcaattgatgacagtgtttgaatcatcataaaaaaaatacctgcttttcatctggacaacccaattgagccactttatctccttttggcaatctgagtaggcggggaacctaggcagggctggctttcttagcgtgtaacttgtgtagcagcacagggcccacacttagaaggaccccacacttggttcaaggctctgctatagcggaaattcttaataatgtttgaagaagggccccatgatttcattttgtgctgagccctcaaaattatgtctgtttcgtggtgggaaatatcctatgttttcttgctcaaacacctttctctctgaaagcagaaaaaggcactgatataaagggaagagaaggaggctcaccggagggaagagaacatagtgaagattcccgcctttggggaggtctggaccacccagggcctccactgccaccttggctggcaagggagaaatgtgttgtgttgtcttagctttaaaacagtcacagttcttgctctatcatagatgaacaaatactttcttgatcattctgtaagaccaggaggttggtaagagtgactaaccagcctaactttaatacacatgtataaagatgttcacagagaaagatgctctgtagagaatttgctaccgaagttggctcaagaatttgtttttagtgttatttaccaagattaggacgtcagtggcttaaattctttgaattcttttcaaggactgcaagattatttgataaagagtagcatgaatcttgtgctctaatattacacagtaagttcaaagaaaggatgtaagtcaaagacttgttacatagagggaaaatggactgggatagaggacagactgatagtttctttctttcatatcacatgtatagagaaataattatatcagaaactcacaaacctagacatggaaaaacagattactgtctattgtcagcatcattttcatctgtaagtcactactggaatatatttttcttttaatttccagtgactttagaatacacacagtttttccgacttttcaaaaatttgattaaatggttttatagtataatattgggaccccataccgttagcccttgtatgtataccaacactgccaaagtaaaacattaggtcaggcatggtggctcaggcctgtaatcccagcattttgggaggctgaggcaagtggataacttgaggtcatgagttcgaaaccagcctggccaaaacagtgaaaccccgtctctactaaaaatacaaaattagccagatgtggtggcgcacacctgtaatcccagctactcaggaagctgaggcaggaaaatcgcttgaacctgggaggtggaagttgcagtgagccgagatcgcaccactgcactccagcctgggtgacaagagcgaaactccatcacaaaaaaaaaaaaaaaa

SEQ ID NO: 281 - DNA, 3653 bp, Homo sapiens
acgcggcgctcgcgctccctccttaaatgagcctgggcgccccgcgcccgccacttcagtggatcccgcgccggggccgcgggcggagctgcctgccggtcccgcgccgcgcgtccgcactcctcggccctcgggcggtcgatgggacggggcgccgcggagcaggaggcggcgcccgtcggggtgctcgggccgcgcgggagcccactgtggggctcgggcatggcgggccgcaggacctgagctctcctcaggggagcggggaggcagctgctggccggcgatggggacggagtggggccgtcgccgccgcgccgagccgtgagcgccgagccaccgccgccgctacctcagcccttcgcgaagcgccgggcagctcgggaacatggccctggagcggctctgctcggtcctcaaagtgttgttaataacagtactggtagtggaagggattgccgtggcccaaaaaacccaagatggacaaaatattggaatcaagcatattcctgcaacccagtgtggcatttgggttcgaaccagcaatggaggtcattttgcttcgccaaattatcctgactcatatccaccaaacaaggagtgtatctacattttggaagctgctccacgtcaaagaatagagttgacctttgatgaacattattatatagaaccatcatttgagtgtcggtttgatcacttggaagttcgagatgggccatttggtttctctcctcttatagatcgttactgtggcgtgaaaagccctccattaattagatcaacagggagattcatgtggattaagtttagttctgatgaagagcttgaaggactgggatttcgagcaaaatattcatttattccagatccagactttacttacctaggaggtattttaaatcccattccagattgtcagttcgagctctcgggagctgatggaatagtgcgctctagtcaggtagaacaagaggagaaaacaaaaccaggccaagccgttgattgcatctggaccattaaagccactccaaaagctaagatttatttgaggttcctagattatcaaatggagcactcaaatgaatgcaagagaaacttcgttgcagtctatgatggaagcagttctattgaaaacctgaaggccaagttttgcagcactgtggccaatgatgtaatgcttaaaacaggaattggagtgattcgaatgtgggcagatgaaggtagtcggcttagcaggtttcgaatgctctttacttcctttgtggagcctccctgcacaagcagcactttcttttgccatagcaacatgtgcatcaataattctttagtctgtaatggtgtccaaaattgtgcatacccttgggatgaaaatcattgtaaagaaaagaaaaaagcaggagtatttgaacaaatcactaagactcatggaacaattattggcattacttcagggattgtcttggtccttctcattatttctattttagtacaagtgaaacagcctcgaaaaaaggtcatggcttgcaaaaccgcttttaataaaaccgggttccaagaagtgtttgatcctcctcattatgaactgttttcactaagggacaaagagatttctgcagacctggcagacttgtcggaagaattggacaactaccagaagatgcggcgctcctccaccgcctcccgctgcatccacgaccaccactgtgggtcgcaggcctccagcgtcaaacaaagcaggaccaacctcagttccatggaacttcctttccgaaatgactttgcacaaccacagccaatgaaaacatttaatagcaccttcaagaaaagtagttacactttcaaacagggacatgagtgccctgagcaggccctggaagaccgagtaatggaggagattccctgtgaaatttatgtcagggggcgagaagattctgcacaagcatccatatccattgacttctaatcttctgctaatggtgatgtgaattcttagggtgtgtacgtacgcagcctccagggcaccatactgtttccagcagccaacccttttctcccatcacaactacgaagaccttgatttaccgttaacctattgtatggtgatgtttttattctctcaggcagtctatatatgttaaaccaatcaaggaacttactctattcagtggaaacaataatcatctctattgcttggtgtcatttataggaagcactgccagttaaagagcattagaagaggtggttggatggagccaggctcaggctgcctcttcgttttagcaacaagaagactgctcttgactgataacagctctgtcaatattttgatgccacaataaacttgatttttctttacattccttttatttttcctttctctaaatttaatttgttttataagcctatcgttttaccatttcattttcttacataagtacaagtggttaatgtaccacatacttcagtataggcatttgttcttgagtgtgtcaaaatacagctagttactgtgccaattaagacccagttgtatttcacccatctgtttcttcttggctaatctctgtacttctgccttttaattactgggcccttattccttattttctgtgagaaataatagatgatatgatttattacctttcaattatatttttctcagttatactagaaaatttcataatcctgggatatatgtaccattgtcagctatgactaaaaatttgaaaaagataaaaatttctagcaagcctttgaagtttaccaagtatagtcacattcagtgacagcccattcattccagtaaagaatcatttcattcactttgggagaggcctataattacatttatttgcaatgtttctcttcgctagattgttacatagctcccattctgttggttttgcttacagcatatggtaaccaaggttagatgccagttaaaattccttagaaattggatgagccttgagattgcttcttaactgggacatgacatttttctagctcttatcaagaataacaacttccacttttttttaaactgcacttttgactttttttatggtataaaaacaataatttataaacataaaagctcattgtgttttttagacttttgatattatttgatactgtacaaactttattaaatcaagatgaaagacctacaggacagattcctttcagtgttcacatcagtggctttgtatgcaaatatgctgtgttggacctggacgctataacttattgtaaagaccttggaaatgtggacataagctctttctttccttttgttactgtatttagtttgtgataaatttttcactgtgtgatatttatgctctaaatcactacacaaatcccatattaaaatatacattgtacctgaccctttaatcatgttatttatgccaccaaggttgtggatcttaaggtatgtatggaaaggaactcatttatcaaattgtaagtaatacagacatgccatttaaaagaggtaaattcttgttttctatattttgttagtaaattctcaatgaaataagttgaagtttcactggatttcattaacttttaaatattacatatatgtgttttctcagattagtgaaaattgtgaccttaaatttaatacacatatactgcctcag

SEQ ID NO: 282 - DNA, 1830 bp, Homo sapiens
aagcttacgaggaattcttggatgacatccctcagcatgtctgagcgactgctgagggagaaaatgatgcccaggttggtccccggcccaccgcagagaggcctgcgctgcacacgcgcagaccgagcatccgcgtcaagaggcgaagagagcgcgcgctccccacgtcctgcgctcctggctgccgggcattcgtctcagccgtgactctcgccaggccggggctggcgcgcccacgtctgaagagcgatgccccgggagatcatcaccctgcagctgggccagtgcggcaaccagattgggttcgagttctggaaacagctgtgcgccgagcatggtatcagccccgagggcatcgtggaggagttcgccaccgagggcactgaccgcaaggacgtctttttctaccaggcagacgatgagcactacatcccccgggccgtgctgctggacttggaaccccgggtgatccactccatcctcaactccccctatgccaagctctacaacccagagaacatctacctgtcggaacatggaggaggagctggcaacaactgggccagcggattctcccagggtgagaaaattcatgaagacatctttgacatcatagaccgagaagcagatggaagtgacagtttggagggcttcgtgctgtgtcactccatcgctgggggtacgggttctggcctgggctcctacctcctggagcgactgaatgacaggtaccccaagaagctagtgcagacttattcagtgtttccctaccaggacgagatgagcgacgtagtggttcagccctacaattcactcctgacactcaagaggctgacgcagaacgcagattgtgtggtggtgctggacaacacagccctgaaccggattgccacagaccgcctgcacatccagaacccgtccttctcccagatcaaccagctggtgtccaccatcatgtcggccagcaccaccaccctgcgctaccccggctacatgaacaatgacctcatcggcctcatcgcctcgctcattcccaccccacggctccactttctcatgaccggctacaccccgctcactacagaccagtcagtggccagcgtgaggaagaccacggtcctggatgtcatgaggcggctgctgcagcccaagaacgtgatggtgtccacaggccgagaccgccagaccaaccactgctacatcgccatcctcaacatcatccagggagaggtggaccccacccaggtccacaagagcctgcagaggatccgggaacggaagttggccaacttcatcccgtggggccccgccagcatccaggtggccctgtcgaggaagtctccctacctgccctcggcccaccgggtcagcgggctcatgatggccaaccacaccagcatctcctcgctctttgaaagttcctgccagcagtttgacaagctgcggaagcgggatgccttcctcgagcagttccgtaaggaggacatgttcaaggacaactttgatgagatggacaggtctagggaggttgttcaggagctcattgatgagtaccatgcggccacccagccagactacatttcctggggcacccaggagcagtgatttccctccccactactccttctccttctagatggtaaccacagcctcgaccatgcctgctccctctgacccagcttcacctcatggacaacccttcttggttcatctccagcccgtgagctggtcctgcttcctcccttccatgccctaacttttaatatgcttgttcagctctaataaagtaataaagcttggttgtcagtataaaaaaaaaaaaaaaaaaaa

SEQ ID NO: 283 - DNA, 3675 bp, Homo sapiens
cgaccacccggcctcggccaataagcgccgccctctcgcccccgtgttactgggtagaagaaaacaaaaacaaacagagcgagaagggccagagactctccgaggcggcggcagagacagaagagcggggtcggggccggctgaccaggaacctgggcgagcagcggcgggggcccgagggattctgaaggaagatttccattaggtaatttgtttaatcagtgcaagcgaaattaagggaaaatggatgtagaaaatgagcagatactgaatgtaaaccctgcagggtattttccctaattctccatggtgcttcaatagcatgttattatcataaaaatgaacagttttgtggaatagatgaccaaatatcctgataacttaagtgactctctcttttccggtgatgaagaaaatgctgggactgaggaaataaagaatgaaataaatggaaattggatttcagcatcctccattaacgaagctagaattaatgccaaggcaaaaaggcgactaaggaaaaactcatcccgggactctggcagaggcgattcggtcagcgacagtgggagtgacgcccttagaagtggattaactgtgccaaccagtccaaagggaaggttgctggataggcgatccagatctgggaaaggaaggggactaccaaagaaaggtggtgcaggaggcaaaggtgtctggggtacacctggacaggtgtatgatgtggaggaggtggatgtgaaagatcctaactatgatgatgaccaggagaactgtgtttatgaaactgtagttttgcctttggatgaaagggcatttgagaagactttaacaccaatcatacaggaatattttgagcatggagatactaatgaagttgcggaaatgttaagagatttaaatcttggtgaaatgaaaagtggagtaccagtgttggcagtatccttagcattggaggggaaggctagtcatagagagatgacatctaagcttctttctgacctttgtgggacagtaatgagcacaactgatgtggaaaaatcatttgataaattgttgaaagatctacctgaattagcactggatactcctagagcaccacagttggtgggccagtttattgctagagctgttggagatggaattttatgtaatacctatattgatagttacaaaggaactgtagattgtgtgcaggctagagctgctctggataaggctaccgtgcttctgagtatgtctaaaggtggaaagcgtaaagatagtgtgtggggctctggaggtgggcagcaatctgtcaatcaccttgttaaagagattgatatgctgctgaaagaatatttactctctggagacatatctgaagctgaacattgccttaaggaactggaagtacctcattttcaccatgagcttgtatatgaagctattataatggttttagagtcaactggagaaagtacatttaagatgattttggatttattaaagtccctttggaagtcttctaccattactgtagaccaaatgaaaagaggttatgagagaatttacaatgaaattccggacattaatctggatgtcccacattcatactctgtgctggagcggtttgtagaagaatgttttcaggctggaataatttccaaacaactcagagatctttgtccttcaaggggcagaaagcgttttgtaagcgaaggagatggaggtcgtcttaaaccagagagctactgaatataagaactcttgcagtcttagatgttataaaaatatatatctgaattgtaagagttgttagcacaagttttttttttttttttttttaagcacttgttttgggtacaaggcatttctgacattttataaacctacatttaaggggaatttttaaaggaaatgttttttcttttttttttgtttttcgagggggcaaggagggacagaaaagtaacctcttcttaagtggaatattctaataagctaccttttgtaagtgccatgtttattatctaatcattccaagttttgcattgatgtctgactgccactcctttctttcaaggacagtgttttttgtagtaaaatcactggtttatacaaagctttatttagggggtaaagttaagctgctaaaaccccatgttggctgctgctgttgagatactgtgctttgggagtaaaaaaagaaagttatttctttgtcttaaagaatttttaaaaaattagtcatgagacttattcatctttccagggaacatactgattggtcttaaaagactagacagttaagtaaaaggtggctggaacatctatttttctacaaaactggaaaaatgaacctggttctagaagaatgtacaccaaaataaaacatgtgaagcagtattgattctttattgggagtacatttttttaggtctcttaaactttaatttcacacagtaaattttgaatctcataaggaagcatatttgaacctagtcaatttaatcttagtgttcccttgaaaactttttttccctacaaaattttaagtgaaaaatacaatagtaaattaagattacactggggaaaaaaatgcaggtatcactttactccattgttatctgacctagagcttaattaagttttagaaatatgtaataccttccatcattccatcatccttaaattctgttaccaaataatggctaatgttacaaaaagttatactccagagacccaaagcttgacatttacctaatgtatgagaaaatattaccaattaacaataaagaatgatcatatttttaacctcttttacatagcctaataactcagcaaggcctcaacgtctgtgctaatttaaactgccaaatattgactgcagcaaacaagaattatattcagaatttatgagggtactgttaggagtatactgcttacaggtttagatatagtctgttagaattaaaaccaagtttagtgttcatatttacctcatgggctttatcaagcccatattacctcagcttatatatagttaccatttttaggtttttaattgtttgacacttggatgataaatgcagtcattttattctcaagtgcttaaaattaatgtaattaaaagcttagctgactacagaataggtgagggtttcttaaaaatgagatttaagggctgggcacggtggctcatgcctgtaatcccagcactttgggaggccgaggtgggcggatcacttgaggttgggagttcatgaccagcttgaccaacatgaagaaaccctgtctctattaaaaatacaaaagtagccaggcatggtggcgcatgcgtgtaatcccagctacttgggaggctgaggcaggagaattgcttgaacctgggaggcagaggttgcagtgagtcgagatggtgccattgctctcgtttgggcaacaagagtgaaactcttgtctcaaaaaaaaaaaaaaatgaggtttaagacagttttgtcattactggtgggatctggtcacacaagatagcattaaacgtgacatggcacataaaattggttaaaaaattttgttttttaattacgtaatgtaaaagcccaacaaacactttatgcaagattggaatgtatcttcaaattcagatttaataaacatgtaaagatcctctgtaaaaaaaaaaaaaaaaaaaaa

SEQ ID NO: 284 - DNA, 2305 bp, Homo sapiens
ggcaacaggcagatttgcctgctgagggtggagacccacgagccgaggcctcctgcagtgttctgcacagcaaaccgcacgctatggctgacagccgggatcccgccagcgaccagatgcagcactggaaggagcagcgggccgcgcagaaagctgatgtcctgaccactggagctggtaacccagtaggagacaaacttaatgttattacagtagggccccgtgggccccttcttgttcaggatgtggttttcactgatgaaatggctcattttgaccgagagagaattcctgagagagttgtgcatgctaaaggagcaggggcctttggctactttgaggtcacacatgacattaccaaatactccaaggcaaaggtatttgagcatattggaaagaagactcccatcgcagttcggttctccactgttgctggagaatcgggttcagctgacacagttcgggaccctcgtgggtttgcagtgaaattttacacagaagatggtaactgggatctcgttggaaataacacccccattttcttcatcagggatcccatattgtttccatcttttatccacagccaaaagagaaatcctcagacacatctgaaggatccggacatggtctgggacttctggagcctacgtcctgagtctctgcatcaggtttctttcttgttcagtgatcgggggattccagatggacatcgccacatgaatggatatggatcacatactttcaagctggttaatgcaaatggggaggcagtttattgcaaattccattataagactgaccagggcatcaaaaacctttctgttgaagatgcggcgagactttcccaggaagatcctgactatggcatccgggatctttttaacgccattgccacaggaaagtacccctcctggactttttacatccaggtcatgacatttaatcaggcagaaacttttccatttaatccattcgatctcaccaaggtttggcctcacaaggactaccctctcatcccagttggtaaactggtcttaaaccggaatccagttaattactttgctgaggttgaacagatagccttcgacccaagcaacatgccacctggcattgaggccagtcctgacaaaatgcttcagggccgcctttttgcctatcctgacactcaccgccatcgcctgggacccaattatcttcatatacctgtgaactgtccctaccgtgctcgagtggccaactaccagcgtgacggcccgatgtgcatgcaggacaatcagggtggtgctccaaattactaccccaacagctttggtgctccggaacaacagccttctgccctggagcacagcatccaatattctggagaagtgcggagattcaacactgccaatgatgataacgttactcaggtgcgggcattctatgtgaacgtgctgaatgaggaacagaggaaacgtctgtgtgagaacattgccggccacctgaaggatgcacaaattttcatccagaagaaagcggtcaagaacttcactgaggtccaccctgactacgggagccacatccaggctcttctggacaagtacaatgctgagaagcctaagaatgcgattcacacctttgtgcagtccggatctcacttggcggcaagggagaaggcaaatctgtgaggccggggccctgcacctgtgcagcgaagcttagcgttcatccgtgtaacccgctcatcactggatgaagattctcctgtgctagatgtgcaaatgcaagctagtggcttcaaaatagagaatcccactttctatagcagattgtgtaacaattttaatgctatttccccaggggaaaatgaaggttaggatttaacagtcatttaaaaaaaaaatttgttttgacggatgattggattattcatttaaaatgattagaaggcaagtttctagctagaaatatgattttatttgacaaaatttgttgaaattatgtatgtttacatatcacctcatggcctattatattaaaatatggctataaatatataaaaagaaaagataaagatgatctactcagaaatttttatttttctaaggttctcataggaaaagtacatttaatacagcagtgtcatcagaagataacttgagcaccgtcatggcttaatgtttattcctgataataattgatcaaattcatttttttcactggagttacattaatgttaattcagcactgatttcacaacagatcaatttgtaattgcttacatttttacaataaataatctgtacgtaagaacaaaaaaaaaaaa

SEQ ID NO: 285 - DNA, 1224 bp, Homo sapiens
ggactcttccggtccctaaagcaagaaggaagaccgagaaaaggaagcggaggagaatcccggggcatacgcttgacacacacgcatacaaaaagagctttagtctcgaaagaggaattaccgaagtgtcgagagaggaattttaagaagtttacaactccgtcttcgccctaaacgcacgctgacccggaaagtaatctcctgaagctaggtcaaaggcgggggttctacggatgccggaaggagggtgcgcgcccatccttttagcaccgcgagaggcgccggtgtttcgagccgtggcaccggcatcggctgacactgctgcctccagctagttatttcgtcctcttccgttcttcacccctacaccttggaggtgaacttctcacctgagggctgtaaagactcgtttgaaaatggagagccaagaaccaacggaatcttctcagaatggcaaacagtatatcatttcagaggagttaatttcagaaggaaaatgggtcaagcttgaaaaaacaacgtacatggatcctactggtaaaactagaacttgggaatcagtgaaacgtacaaccaggaaagagcagactgcggatggtgtcgcggtcatccccgtgctgcagagaacacttcactatgagtgtatcgttctggtgaaacagttccgaccaccaatggggggctactgcatagagttccctgcaggtctcatagatgatggtgaaaccccagaagcagctgctctccgggagcttgaagaagaaactggctacaaaggggacattgccgaatgttctccagcggtctgtatggacccaggcttgtcaaactgtactatacacatcgtgacagtcaccattaacggagatgatgccgaaaacgcaaggccgaagccaaagccaggggatggagagtttgtggaagtcatttctttacccaagaatgacctgctgcagagacttgatgctctggtagctgaagaacatctcacagtggacgccagggtctattcctacgctctagcactgaaacatgcaaatgcaaagccatttgaagtgcccttcttgaaattttaagcccaaatatgacactggccatttttgtaaacgagaccaccaggccttcttcactaagactttgtattcaacttagtttaatgtagatttgccattagctttttcgtaaaataaaagcacagaacagaaaaaaaaaaaaaaaaaaaaa

SEQ ID NO: 286 - DNA, 805 bp, Homo sapiens
ccccacctagatgcaaagcaggattcaaaagaacatctttgcgttttctaccggctccccatcatcgtactagggaggaagaagcgggtgagaaacaaaacttctttccattgtcctgcccgtttctgcggacttgttctgaggccgaggagcctgtgttggaagagatggtgatgggcctgggcgttttgttgttggtcttcgtgctgggtctgggtctgaccccaccgaccctggctcaggataactccaggtacacacacttcctgacccagcactatgatgccaaaccacagggccgggatgacagatactgtgaaagcatcatgaggagacggggcctgacctcaccctgcaaagacatcaacacatttattcatggcaacaagcgcagcatcaaggccatctgtgaaaacaagaatggaaaccctcacagagaaaacctaagaataagcaagtcttctttccaggtcaccacttgcaagctacatggaggttccccctggcctccatgccagtaccgagccacagcggggttcagaaacgttgttgttgcttgtgaaaatggcttacctgtccacttggatcagtcaattttccgtcgtccgtaaccagcgggcccctggtcaagtgctggctctgctgtccttgccttccatttcccctctgcacccagaacagtggtggcaacattcattgccaagggcccaaagaaagagctacctggaccttttgttttctgtttgacaacatgtttaataaataaaaatgtcttgatatcagtaagaaaaaaaaaaaaaaaaaa

SEQ ID NO: 287 - DNA, 1474 bp, Homo sapiens
aagcggcggcaggccggcggttggtgtgtcccgggtgtggggaggcgacagagccctggcacttgagggttgagggggcctccccagcgcggcgaaccgtctagcctccggaggccaggccgtgagtgcgggaggtatacgccaaggcggaagaattttgccactcactacctgtgtgacctcgggtaaattagccttggaacgtcagtttcttcgtctctataattgaaataataatagtacctctctcaggattgttgtgagccgtcagtgaaacacttagagcagtttctggcacatggtagaattgggctatttgctgaagcttcttggtggcccttgctagcccaggaagaaacttacattttgatttttttgtaccatggctttggttcacaaattgctgcgtggtacttattttctcagaaaattctctaagccaacttctgccttgtatccatttttgggtattcgctttgcagagtattccagtagtcttcagaaaccagtggcttctcctggcaaagcctcctcacagaggaagactgaaggggatttgcaaggagatcaccagaaagaagttgctttggatataacttcttctgaggagaagcctgatgttagtttcgataaagcaattagagatgaagcaatataccattttaggcttttgaaggatgaaattgtggatcattggagaggaccggaaggccaccctctgcatgaggtcttgctggaacaagccaaggttgtctggcaattccgggggaaagaagatttggataagtggacagtgacttctgataagacgattggaggcagaagtgaagtgtttttgaaaatgggcaagaataaccaaagtgcactgctatatggaactctgagctctgaggcgcctcaggacggggagtctacccgaagtgggtactgtgcaatgatatccaggattccaaggggtgcttttgagaggaagatgtcttacgattggtcccagttcaatactctgtatctccgtgtacgtggggatggtcggccttggatggtgaatatcaaggaggacacagatttcttccagaggacgaatcagatgtatagttacttcatgttcacccgcgggggaccctactggcaggaggtcaagattcctttttccaaatttttcttctctaatcgaggaagaatccgggatgttcagcatgagcttccgcttgataagatctcttctataggattcaccttggctgataaagtggatggtccattcttcctggagatagattttattggcgtgtttactgatccagctcatacagaagaatttgcctatgaaaattctccagagcttaacccaaggctttttaaataaagatcatatggtagttttgttttactaatctaagggtactagcatctacaatgatatagacaaaataaaatatttctttaatggcatccaaaaaaaaaaaaaaaaaaa

SEQ ID NO: 288 - DNA, 5868 bp, Homo sapiens
gccgaggggctggaaatgaaagtaaagcgctccagagccacatggacggagctgccggggcggcggcgccgggagcaggatgcggccgcccgtaattaaatagcatttactcttattattactaataataataacgtaatcatacctctagtcatagcataccatttatcgggctcggcgcaggcccgcggggagcgcagcccggcggagagactgatggagaggcagaaacggaaggcggacatcgagaaagggctgcagttcattcagtcgacactacccctaaagcaagaagaatatgaggcctttctgctcaagctggtgcagaatctgtttgctgagggcaatgatctgttccgggagaaggactataagcaggctctggtgcagtacatggaagggctgaacgtggccgactacgctgcctctgaccaggtggccctgccccgggagctgctgtgcaagctgcatgtcaatagggccgcctgctacttcaccatgggcctgtatgagaaggcgctggaggacagcgagaaggcgctgggcctggacagtgagagtatccgggcgttgttccgcaaggcacgcgctctcaatgaactgggacgccacaaggaggcctacgagtgcagcagccggtgttccctcgccctgccccacgatgaaagcgtgactcagcttggtcaggagctggcccagaaactggggctgcgagttcgcaaggcgtataagaggccccaggaattggaaaccttttctctgctcagtaacggcactgcggctggcgtggcagatcagggaacttctaatggattggggtccatagatgacatcgaaacagactgctacgtggaccctcgaggctccccagcccttctcccctccacgcccacgatgcccctgttccctcacgttctggacctgctggcccccctggacagcagcaggaccctccccagcaccgacagcctggatgacttctcagacggggatgtctttggcccagagctggacaccctcctggactcgctgtctctggtccagggtggcctgtctggcagcggcgtgcctagtgagttgccccagctgatacccgtgttccccggcgggaccccactgctaccacctgtggtgggtggctccatccctgtctccagcccactgccccccgcctccttcggcttggtcatggacccctccaagaagctggccgcctctgtgctggatgccctcgatcccccgggccccacgctggaccccctggacctgctgccgtactcggagacccggctggatgcactcgacagctttgggtcgacacgaggctccctggacaaacctgactccttcatggaggagaccaactcacaggaccaccgtccccctagcggtgctcagaaaccagccccctcgccagagccctgcatgcccaacactgccttgctcatcaagaaccccttggctgccacccacgagttcaagcaggcctgccagctctgctaccccaagacaggcccccgggctggcgactacacctaccgtgagggccttgagcacaagtgcaagcgggacatcctgctcggccggctccggagctcggaggaccagacctggaagcggatccggccccggcccactaagaccagcttcgtgggctcctactacctgtgcaaagacatgattaacaagcaggactgtaagtacggggataactgcaccttcgcctaccatcaggaggagatcgacgtgtggaccgaggagcggaagggcaccctcaaccgcgacctgctcttcgacccgctggggggtgttaagcgcggcagcctcaccatcgccaagctcctgaaggagcaccagggcatcttcaccttcctctgcgagatctgctttgacagtaaaccccggatcatcagcaaaggcaccaaggactctccgtctgtctgctccaacctggctgccaagcacagcttctacaacaacaagtgcctggtgcacatcgtccgctccacctccctcaagtactccaagatccgccagttccaggagcacttccagttcgacgtgtgccgccatgaggtgcgctacggctgcctgcgggaggacagctgccacttcgcccacagcttcatcgagctcaaggtctggctgctgcagcagtactcaggcatgacccacgaagacatcgttcaggagtctaagaagtactggcagcagatggaggcgcatgcggggaaggccagcagcagcatgggtgctccgaggacacatgggcccagcacctttgacctgcagatgaagtttgtatgtggccagtgctggagaaacgggcaggtggtggagcctgacaaggacctcaagtactgtagtgccaaggcccggcactgctggaccaaggagcggcgggtccttctggtgatgtccaaggccaagaggaaatgggtgtcagtgaggccactgccatccattcgtaacttcccacagcaatacgatctctgcatccatgcacagaacggccgcaagtgccaatatgtggggaactgctccttcgcacacagcccggaggagagggacatgtggaccttcatgaaggagaacaagatcctggacatgcagcagacctatgacatgtggctgaaaaaacacaacccaggaaagcctggagaagggacccccatcagttctcgggaaggggagaagcagatccagatgcccacggactacgcggacatcatgatgggctaccactgctggctctgcggcaagaacagcaacagcaagaagcagtggcagcagcacatccagtccgagaagcacaaggagaaggtcttcacgtccgacagtgacgccagcggctgggccttccgcttccccatgggcgagttccggctctgcgacaggctccagaagggcaaagcctgcccagatggggacaagtgccgctgcgcccatggacaggaggagctcaacgagtggctggaccggcgcgaggtgctgaagcagaagttggccaaggctcgcaaggacatgctgctgtgcccacgggacgacgactttggcaaatacaacttcctgctgcaagaggacggggaccttgccggtgccaccccagaagcccctgctgctgctgccaccgccaccactggggagtagggccaggtgttggccgtgggtgaagtcctggggtcagggggtggggtggggccagaaggcctgatagaagggtcagggcaggccaggggggtggggggccgccctcatcaggcagcccccagccccctgaggccctgtccatcttctccccaccaccgccccggtgtgcgtacccaggcgcacgtgctgcagcccccggaggccccgctgaaacctgggctgcccttcccccacccccacggctctcctggttgaggagggaggggcctggctgacccctccagcttcagcctccagctttaacttctgtctgctcctaatgggggcccaaagctcagggctggggagcctggggtccccacttgaatctccagcaggagggtccttctctccctggcccgtcctcctcccaccccctccccctgggggcaaatcaggacacaacagagggcagaggccccattagctttaaaatgtagccccaggttggagctgggaacactgtactggccacttaccctctggggcctcagctttccctccggaaggctgggaggaggtgggctagatgatctttggagcttaaggagtcccagccctttctctgatgccaccacctgaaccctgctccctcgtgggccagtgaaaatagactgtaggtcctcagagccttcagagatgatccagcccaaaccccattttgcagagaggaaaactgaggcctagaagggaggagtggtccacccacggtcccagcacaaggcagagctgggatgaaaacagggctgaaaagactcagggccaattattggctgagcccacggtcccctcagcagggatgcgatggtctctgaatcagtgtgcagctggggtcccaggcagcgctgcctgggggctggggaggggaggcccagaggagggctggccatgtgagcaccccatgaagggaccgccccctcccaaggatggtccctttgggtgcagcagcagaggtcacctcctgacatgcgctctgggaaaggtggcagagggcaggacaccatgagctcaggatctgtgtgaggtgtgggaggtgggaagggtgagggtctgggggaatgcggagaaaagggaggcttgaccccgggcaccatgggccactccaggatgggacacggcccctctttcttggggacccagtatgtcctctcctctagacccagacatacagttataaccgtctgtcctagcccctccctaatccctggccctcccagctgtctgggacttcagtggacccccagcccctgcccccactcaccaaggcctcgctcgtccctctcgtctgacatgtctgtgtgcacccccctcctctccaccctaccttccatcaaccagggcagatccaccgtgccctggttccccagacattccagaatgccccacatcattggcacaggagtggggcagccccggaaggaaccagggattaggctgtaggggggtgagaaggagagaagggaccaccccattcttctcaagcaaggattgccagcgcgcgctgacacagtgatgggctgcccagggctggaggggacgctgttcctcccgccgccactgcccaacctttcctgataatcgtggcatgcgccctttcctcttccctgccccaccccctggccgcagcaggccagcactgcagagtttgggtgctggtggtgtggctgtaggggaggggagaccacacccaaggtgggggctgtggccatgtgtggccgtgatgtcgatgatactcgttttccctgatccgtggtgttgcagtccgttgtcaccagccttgtttctagtgtgtatatatgtcgcccccgtgatgcatatatacacaggtattaaatatatcgctctatataatattatatatgtgtgtggtatccaaggaatcacttttatgagggctaaagataaagaatttggccagaaaatgcagccatccttgtgtgattaggagggtttcaggggccactggactatttgcaaggtgacagggactggagccatggctcagaggtgattcgggcagccagggacaggagccaccctccccaggcccaactctgctagcttcccagaccacccccatcgagtgcggagagagtgggagtgctcagggaaagaaggtgatttgtatttgtctccccgctgaaaagaacaggattcaagtccagagttttcatcttcagcctgtgatctgtccagggacccttgggatctggggcttcctggcctggccagagctggagcccccacagggtaaggaagagagagtgggaggcagagtgtgatggggaggagggacaggaagacccttttaatgatgagggtaactatttcagttgtgagccttctagggccccaggctgggaggctcagaggactgaatctgggacctgtgttccccccggcaggcagggacaagatggcatggcaagcatgggggcggggtgggtggggagggatgctgcatttctcagctgggcagtaatcaatttaatggtcctttaaaatgtctgtgtattaaaaatttaagaataccacactttaatattaaatattcataaggtctagtatcttgataataatgtagatgttttaataacaatttttgtccttcttaaaataaaatgaaagaaacttgcttcccttagcctttgttctagaaaataaacttgtgcactttga

SEQ ID NO: 289 - DNA, 2547 bp, Homo sapiens
gcacagggagccggctaaaacagactactcccccgtgcagtcgttccctctaccctaataaggctttggcgcctctcccagaactcggtcctggggaatgctctttgcctggtccagccccgacaaacgtggtctgagaacagcggagcgcggaaaccgcggagcatgactcctccgaagctgcgagcgtcgctgtcgccgtcgctgctgctgctgctgagtggttgcctcctcgcggctgctcggagggagaaaggggcggctagcaacgtggcggagccggtccccgggcccactggcggctcctcgggtcgcttcctcagccccgagcagcacgcgtgcagctggcagctcctgctgcccgccccggaggccgcagcgggcagcgagctggcgctgcgctgccagagcccggacggggcgcgccaccagtgcgcctaccgcgggcatccggagcgctgcgcagcctacgccgctcgccgcgcgcacttctggaagcaggtgctgggagggctgcgcaagaagcggaggccctgtcacgaccccgcgccgctccaggcccgcttgtgcgcgggcaagaagggccacggcgccgagctgcggctagtgccccgcgcgtccccgcccgcacgccccaccgtcgcgggattcgcgggggagtccaagccccgggcccggaaccgggggcggacccgggagcgtgcgtccggcccagccgctgggaccccgcctccccaaagcgcaccgcccaaagaaaacccctcagagaggaagaccaacgtgggcaagaggaaggcggccttggtccccaacgaggagcgacccatggggaccgggcccgaccccgacgggctggacgggaacgcggagctcacggagacctactgcgctgagaagtggcactccctctgcaacttctttgtcaatttctggaacggctgagactgcctgccggcttagggagggttgatgggggaggcgtggggaagggaaagctaagggcgtcttagaccggggggtactgtgatagagattggggagaagtccaggttctcgaatgggggtgggggcaagggtaagggtgagatgcttgggatgagagtgtaaggggtatggagaatctctgggatagcagagaagttaaaaattttgaaaagtctcagtcctgattaagagcaggaaaaataatggaaacagaaataggcgtactttaaatgtgcaaaaactggagactggggagagaaatcgatgcagagagaggctgagaataagggggagatagagtgactaaagtgatgtgagtcccatgtggggagggggatgcaatgtttattgtttaacatttctattaaatgcagccatgagcaattgccaacctgagccaggttgaatcaatgtcttctcacttaatcagctaacaagactgcagactttttttccgtttctgaattggtataaacttggatgcggcgtggtgggtgtcatagataacctctatagggacagaagcctcacaggtcaagactggctccaaggaaagttttgcagaatgatttcctttccattcttttagaagagctacctttttttttttttttccctgacagggtctggcttgcccaggctggagtgcggtggctagtcacaggtgtaataataggcactgcagtctccaactcctggcctcaagggatcctcacatcttagcctccagaatagctaggagtaggagtagctgggactacaagcatgcacagctgcacttggcttagaagtgctactttatttttatttttgagacagggtcttgtgtcatccagactggagcagtggtgcaattatggctcactgcggcctcgactttccagtctcaagtgatcctctgcctcagcctccggagtagccaggactacaggggtgtgccactagaagtgctactttttaacgaaatggtgactaatgttctggaactttcccattaaccttctgcatttagaaggaattatagatgttgagtgctccagtaaacagtgattctctttatatctgattttttttttttaaacagctaaaatgtaagtatgtatctcagagtcattttgaccattatggaagttatatctctctgtttcatgtaactaattattaatatatttcatttttagtgtgatgtaatgagagactgtgtgtgtatgttaggtgctcaataaaaactgtatggttagatttaaagaagtggcaaggcaatggaaattctacctgcatttgatctacttccaagtacaccttgaattaagttcttaaacacatcttgaattgctgggaaaagacagaaactaagaagttgacataaagcaagagtcacaaactggcagccacctggccttatcattgttctatttgatttgcaccctggttctctttctttttcccttcctccccaccttcctcccatccattgttgaatctgtggatgcagagcccacggatgtggaggggcaactatatatatgtttttccattatatatataaatgtgtgtgtatgt

SEQ ID NO: 290 - DNA, 2040 bp, Homo sapiens
gggagtaggcagcggcgccgcgtccgctctcgcccgctctcgcccgctcgccagccggctctcctcccgccgcaggacccgcgcgccgcgctcgggggccatgcagcgcctggccatggacctgcggatgttgtcccgggagctctccctctacctggaacaccaagtccgggtggggttcttcggctcgggggtgggcttatcccttatcctgggcttcagcgtcgcttatgccttctactacctgagcagcattgccaagaaaccccagttagtgaccgggggtgagagtttcagccgcttccttcaagaccactgtcccgtggttacagaaacgtactacccgacggtctggtgctgggagggtcgaggacagaccctgcttagacctttcatcacttcgaagcccccggtgcagtacaggaatgaacttattaaaactgcagatggaggacagatttcactggactggtttgataatgataacagtacgtgttatatggatgccagcaccagacctactatcttattgttgcctggcctcacgggaacaagcaaggagtcatatatccttcatatgatccatcttagtgaagaattaggatacagatgtgtggtttttaacaacagaggagtggcgggggagaatctcttgacgccaaggacttattgttgtgctaacactgaagacttggagacagttattcaccatgtacacagcctgtacccttctgctcctttcctggcagcaggggtttcaatgggaggaatgctgcttctaaattacttgggcaaaattgggtccaaaacgcctttgatggcagctgcaactttttccgttggttggaacaccttcgcttgctcagagtcattggaaaaaccactgaactggctactttttaattactatttgacaacctgccttcagtcttcagttaataagcaccgacatatgtttgtaaaacaagttgatatggatcatgtcatgaaggctaaatccatcagagagtttgataagcgattcacttcagtcatgtttggataccaaacaattgatgattattatactgatgccagtccgagtcctagactgaagtcagtaggaattccagtattgtgtctaaattctgtggatgatgttttctcacccagtcatgctattccaatagaaactgctaagcaaaatcctaatgttgctttggtccttacttcttatggaggccatattggttttctggagggaatctggccaagacagtccacttacatggatcgtgtcttcaagcaatttgtgcaagccatggttgagcatggacatgaactctcttaacatgtagttctttgggtgcattttgtctgaaccacaattgtgaaggcagctcagcttagtgcacaaattttaactgttgtatataaagcaaataagccagcagatgggtgaagaggtccagaatgatatgcaaaaactactttttagagaaacaaaacaactttgtagcaacaaattaaatatagtattagattgttacttacgtagattttatttttactatgccttaccaagtacatccttaaacaaagtagtatgtacatgaaattgcacttaaccaaaactattgtgtaaaacaaattttaattcctcagggttttaatttaaactagtatttttttagattatttgttttaggtgatttaatggtactttaataactactaagaaatattggctatttcaatgtaagttataaggtggtacattcctaagggtatttatagttgatgataacatgaaaactgaaataagataaaatacaacgtgctaaatcttttatgtattctaactttaaaagacaagtgcaacaaagttagactgacttctatatgtgctcttttactctgataatattaaattaggactaacttatgttttataatgattataatttacatgcttatttttaaaatagtatatgtggacacatatatatcattatattaaaataaattctaccattttaaattggaaaaaaaaaaaaaaaa

SEQ ID NO: 291 - DNA, 1889 bp, Homo sapiens
agcagataatggcaagcatggctgccgtgctcacctgggctctggctcttctttcagcgttttcggccacccaggcacggaaaggcttctgggactacttcagccagaccagcggggacaaaggcagggtggagcagatccatcagcagaagatggctcgcgagcccgcgaccctgaaagacagccttgagcaagacctcaacaatatgaacaagttcctggaaaagctgaggcctctgagtgggagcgaggctcctcggctcccacaggacccggtgggcatgcggcggcagctgcaggaggagttggaggaggtgaaggctcgcctccagccctacatggcagaggcgcacgagctggtgggctggaatttggagggcttgcggcagcaactgaagccctacacgatggatctgatggagcaggtggccctgcgcgtgcaggagctgcaggagcagttgcgcgtggtgggggaagacaccaaggcccagttgctggggggcgtggacgaggcttgggctttgctgcagggactgcagagccgcgtggtgcaccacaccggccgcttcaaagagctcttccacccatacgccgagagcctggtgagcggcatcgggcgccacgtgcaggagctgcaccgcagtgtggctccgcacgcccccgccagccccgcgcgcctcagtcgctgcgtgcaggtgctctcccggaagctcacgctcaaggccaaggccctgcacgcacgcatccagcagaacctggaccagctgcgcgaagagctcagcagagcctttgcaggcactgggactgaggaaggggccggcccggacccccagatgctctccgaggaggtgcgccagcgacttcaggctttccgccaggacacctacctgcagatagctgccttcactcgcgccatcgaccaggagactgaggaggtccagcagcagctggcgccacctccaccaggccacagtgccttcgccccagagtttcaacaaacagacagtggcaaggttctgagcaagctgcaggcccgtctggatgacctgtgggaagacatcactcacagccttcatgaccagggccacagccatctgggggacccctgaggatctacctgcccaggcccattcccagctccttgtctggggagccttggctctgagcctctagcatggttcagtccttgaaagtggcctgttgggtggagggtggaaggtcctgtgcaggacagggaggccaccaaaggggctgctgtctcctgcatatccagcctcctgcgactccccaatctggatgcattacattcaccaggctttgcaaacccagcctcccagtgctcatttgggaatgctcatgagttactccattcaagggtgagggagtagggagggagaggcaccatgcatgtgggtgattatctgcaagcctgtttgccgtgatgctggaagcctgtgccactacatcctggagtttggctctagtcacttctggctgcctggtggccactgctacagctggtccacagagaggagcacttgtctccccagggctgccatggcagctatcaggggaatagaagggagaaagagaatatcatggggagaacatgtgatggtgtgtgaatatccctgctggctctgatgctggtgggtacgaaaggtgtgggctgtgataggagagggcagagcccatgtttcctgacatagctctacacctaaataagggactgaaccctcccaactgtgggagctccttaaaccctctggggagcatactgtgtgctctccccatctccagcccctccctctgggttcccaagttgaagcctagacttctggctcaaatgaaatagatgtttatgataaaaaaaaaaaaaaaaaaaaaaa

SEQ ID NO: 292 - DNA, 2395 bp, Homo sapiens
cattcaaacccagtccattctggctcatggggcccaagccttgctctgctgccccaggctgtgtaggatgcatctgcggtggccattcttctctccagaggtccttcctaggactgactttgtggagattctgtgctggtaggtggcggggcaagacacgcctgtctctccccctggaaggagtcagtccagcaagaaacctgatgaaaccagtgactcccagctctggatgagatggaccaaacgcccccggcgcgtcctgaatatctggtctcagggattcgaactccccctgtgaggaggaacagcaaactggccaccctgggcaggatcttcaaaccctggaaatggaggaaaaagaaaaacgaaaaactgaagcagacaacgtcagcgctggagaagaagatggccggcaggcaaggccgagaggagctcatcaagaaggggctgctggagatgatggagcaggatgctgaaagcaaaacttgcaaccccgatggaggaccccgatctgtacagagtgaaccacccactcccaagtcggagacgctgacttcagaagatgcccagcccggaagccccttggccactgggacggaccaggtctccctggacaagccactgtcctcagctgcccacttggacgatgcagccaagatgccttctgcatccagtggtgaagaagcagacgctggcagcctcctgcccaccaccaatgagctctcccaagccttagctggggctgactccctggacagtcctcccagacctctggagagatccgtgggccagctccccagccccccactgctgcccactccgccacccaaggcaagctccaaaaccacaaaaaatgtcacaggccaagccacactcttccaagcctccagcatgaagagtgccgacccttccctccggggccagctctccacacccacggggtctccgcatctcaccacggtccaccggcctcttcccccaagccgcgtcattgaggagctgcacagggcgctggccacgaagcaccgccaggacagttttcaaggaagagaaagtaaagggtctccaaagaagcggctggatgtccgtctgtcgagaacgtccagcgtggagcggggcaaggagagggaggaggcttggagctttgacggggcattggagaacaagcgaactgccgctaaggaatctgaggagaacaaggagaacctgatcataaattctgaactcaaagacgacttgcttttgtatcaggacgaggaggcgctgaacgactccattatttctggaacactgccacggaaatgcaagaaggagctcctggccgtgaagctaaggaaccggccaagcaaacaggaactagaagaccggaacattttccccagaaggactgatgaagaaagacaggagatccggcagcagatcgagatgaagctttccaaacggctgagccaaagacctgccgtggaagagctggagagaagaaatatcttgaaacaaaggaatgatcagacagagcaggaagaaagaagagaaatcaagcaaagattgacaagaaagcttaatcagagacccactgttgatgaattaagagacagaaaaattctgatacgattcagtgattacgtggaagtagcaaaagcgcaggactatgacaggagggcagacaaaccctggacgagactgtcagcagcagataaggcagcaattcgtaaagaattaaatgagtacaaaagtaatgaaatggaggtacatgcatcaagcaagcacttgacaagattccacaggccatagagattttcttctgagaagaatttgtgtttaattttttgataccaacactgaacattcatcagggaactttcctgaagttcagctcaagactaccctacctgctgtgtttgtgagaagagtaggatcacacacacaggtgcaatcttgaccacacttacctgcaagaggagtaaccagaggacacacttccttccttctttggtgtctgaggagtgtgaactgttggggtcagttaagacccaacataactctatcagaagaaaactgttgtttgcctttcaaccttgttttacagttctgcagtgtaatggaggacgggcaacgtgcatgtgcaggctcaccactcccaggcctctgacatgagggacatgtgacagtgtcattcagtattatgttcaaaagacatttttatcctgatcataattaatttgaaaactctttaagttcatgttatacaagatgatttactgtattatacttttccttttttatataatgtctaacaaaaaatacagctgcaacattttgattcctgttaattttgttctttaattaaatgactacttattgcaggaaattaaaaaaaaaaaaaaaaaaaaaaaaa

SEQ ID NO: 293 - DNA, 2659 bp, Homo sapiens
ccgcttctgtggccacggcagatgaaacagaaaggctaaagagggctggagtcaggggacttctcttccaccagcttcacggtgatgatatggcatctgccagctctagccgggcaggagtggccctgccttttgagaagtctcagctcactttgaaagtggtgtccgcaaagcccaaggtgcataatcgtcaacctcgaattaactcctacgtggaggtggcggtggatggactccccagtgagaccaagaagactgggaagcgcattgggagctctgagcttctctggaatgagatcatcattttgaatgtcacggcacagagtcatttagatttaaaggtctggagctgccataccttgagaaatgaactgctaggcaccgcatctgtcaacctctccaacgtcttgaagaacaatgggggcaaaatggagaacatgcagctgaccctgaacctgcagacggagaacaaaggcagcgttgtctcaggcggagagctgacaattttcctggacgggccaactgttgatctgggaaatgtgcctaatggcagtgccctgacagatggatcacagctgccttcgagagactccagtggaacagcagtagctccagagaaccggcaccagccccccagcacaaactgctttggtggaagatcccggacgcacagacattcgggtgcttcagccagaacaaccccagcaaccggcgagcaaagccccggtgctcggagccggcaccgccagcccgtcaagaactcaggccacagtggcttggccaatggcacagtgaatgatgaacccacaacagccactgatcccgaagaaccttccgttgttggtgtgacgtccccacctgctgcacccttgagtgtgaccccgaatcccaacacgacttctctccctgccccagccacaccggctgaaggagaggaacccagcacttcgggtacacagcagctcccagcggctgcccaggcccccgacgctctgcctgctggatgggaacagcgagagctgcccaacggacgtgtctattatgttgaccacaataccaagaccaccacctgggagcggccccttcctccagggtaggtcatcaactgagaagacctgagactctggaactgacaccatgagtcacccaatggcttcttgaaacggtccctttctgcggaggtagcatagcacagtgacgtttattccgggtcacttgattgcttttcctatccacttaccttaatattgctcccatgtcttaggacatattagaattattagaagatctctgggaaacaaaaggcgcatgggaggccaagatttagagtgttgatgcattccgccgtaccctatgcccagcctgtccctaaaggcagagtgcttcttattcggcagggcttcgtgagaatgccgccaagttatccaaaaccaaaggatgagagaggcttccaagagagggaagactgtccaagttcaaggagaaggggtttggttccctgtctgccagggacagaaagttctttccacatgtgtctcctggtcccgagagctttcaaaaggggatgtattctgctccaagaaagaatcacctcccagtaaagtagccatgaagggctcctgtataaaatatgcacacttcccctgccctgagtttgtggagggaaaggctgtcggaagtagggactcttaggagagcccgtgtgccctgtttggttcagctgtcaggcgtgtgccacacacatcccacctcatcttctggtcccataattctccatggatgggctgcttttagctccagttttccagtagaatgcttgagttttccttttttccgtacctcctggaggatgaaactcataacctgtcatcatcagtactcactgtgttttccactttgacttgaagtcaaatgaagttaccaaagttaaacatggacttctcaaattagaaaaaaacaaacaacaaaaaaacaggttaagtgttttgttatgaaaattatgaaaatgttcttattattatggaaaatttcaaatagatatagagagaataatgttacaaacccccacatactcaacatttagcttcaaaaattatcaactcatggcgggttttgtttcatctgtacaaactagtcggcacactatgatggcctgtggacaaaatccggccctctgactgtttttgtaaataaggttttattggaacacagccacacatatttgttgacttattgtttttggctgtttttgtacttcattggcagagttgagtaattgcagcagactctatggcttgcaaaacctaaaataattactttgtgtagcgctttatagaaaaaatttgctaactcccgatctgtaacccccaacctatccgccgcaccctgatctaggtaattttgaagcaaatcccaaatgtcacatcatctatccatatttcactatgtatttctaaaacatattcttttattcaaaataaaactctaatatcattaacagtattttgtttatattatcaaatacccagtcaatatttgactttctataattgtgtcacaaattaaacattgactttaacagtatgtattacacacttgtactttgtgtactttataacatgtgcactttaaaacagcaggagctctgtgtaaaaaaaaa

SEQ ID NO: 294 - DNA, 5987 bp, Homo sapiens
ggcgatcgagcgccgcggagcgcgtccctccctcgccaatccggctccggcgccggcgcccgcccgcgttttcccggcgcctgccgctccgccgctccgacccggcacgcagtcccggcccgagccgacgccttgcaggagggttcaaatccgcgcgggggagctgcgacgcgcaagggctgcggagccgcgggccggcgagcgcgtcgccaccatgaagcagctgcctgtaccctgttgaaacttcatggccacagccccaggccctgctggcattgccatgggcagcgtgggcagcctgttggaacggcaggacttctcccctgaagagctgcgggcggcacttgccgggtctcggggctcccgccagcctgatgggctcctccggaagggcttgggccagcgtgagttcctcagctacctgcacctccccaagaaggacagcaagagcaccaagaacaccaagcgggcccctcggaacgagcctgccgactatgccaccctctactaccgggaacattctcgcgcgggtgacttcagcaagacctcgctgccagaacggggtcgctttgacaagtgccgcattcgcccctcagtgttcaagcctacggcgggcaacgggaaaggcttcctatccatgcaaagtctggcgtcccacaaaggccagaagctgtggcgcagcaatggcagcctgcacacgctggcctgccacccgcccctgagccccgggccccgggccagccaggcccgggcacagctgctgcacgccctcagcctagatgagggcggccctgagcccgagcccagcctgtccgactcctccagtgggggtagttttggtcgcagtcctggtactggccctagccccttcagctcctcccttggccaccttaaccacctcgggggctccctggaccgggcctctcaaggacccaaggaggctgggccaccagctgtgctgagctgcctgcccgagccaccacccccctacgagttctcctgctcctctgccgaggaaatgggagccgtgctgcccgagacctgtgaggagctcaagaggggccttggcgatgaggacggctccaaccccttcacgcaggtgctggaggagcgccagcggctgtggctggctgagctgaagcgcctgtatgtggagcggctgcacgaggtgacccagaaggctgagcgcagcgagcgcaacctccagctgcagctgtttatggctcagcaggagcagcggcgcctgcgcaaggagctgcgggctcagcagggcctggctccggagcctcgggcccccggcaccctcccagaggctgaccccagtgcacgaccagaggaggaagcccgatgggaggtgtgccagaagacagcagagattagcctcttgaagcagcagctgcgtgaagcccaggcggaactggcccagaagctggcggagatcttcagtctgaagacacaacttcggggcagccgggcacaagcccaggctcaggacgcagagctggtccggctgcgcgaggctgtgcgcagcctgcaggagcaggcccctcgggaggaagccccaggcagctgtgagactgatgactgcaagagcaggggcctgctaggggaggcaggaggcagcgaggccagagacagtgctgagcagctgcgggctgagctgctgcaggagcgacttcggggccaggagcaggcgctgcgctttgagcaggagcggcggacttggcaggaggagaaggagcgcgtgctgcgctaccagcgggagatccagggagggtacatggacatgtaccgccgcaaccaggcactggagcaggaactgcgggcactgcgggagccccccacaccctggagtccccggctcgagtcctccaagatctgaggccagcagagcgagctgacagcagcaacactgtcagaaggtgccctgagacggccggctcagccttcccttgcactggttggggtggaacctgcagaggccagcccggggctggggaggcgcaaggagaggagggatccagtggggccgtgggctgggtagggtgccttggcaggagccaggacaaggccctcctggcagaggagcacctaggcagggcccagccctgcttcctggagtggatgtggcccagagaaggaggctgggggatcaccagccccaaggtcccgaagggcaggtcagagggagagaggctggagacctgggctggggccttcctccagggaaggaggctggggtgggaacactggcctcccccagaataaaaccatgttttctaccagaggctcagaatacgctgagcctgtgaccagaggatgatggatggtcgggattgaggctgttgacctgggcagtagctcctcccatggccagtggtcagtgggagggtgtgccctgcgcctgtctgcatggccactgggcatgtgtgttgggagcagaggagtcctactccttgcctcagccccacacggttccttagctgccgtgtgggctgaaattcctttctttagcaccagtggagttttcagaaggaacaacaccagggaatgccaaaaaaacaaagggcaagtcaaccaaggcattttgagaacatgaaatgtcttcttggtgggaaggctgggccccaggagtatccacaggctcaggccatgcccctccccgcacccacctcctgtctccctccctccctccataggagtggggggcccctagaagtgctctgcctcattccctgttcgtaggaaggtgcaggagaggaggtgggcaagcttatgggtttcttggtaaagagcctttaccacagcaaggaatgggaacatttccccatcagcaacggggctctagggcattattaagtaggggtgaaatatgattgatttgcattctggaaagctctcccaggaggaagcattccccaccccaccttgcctctgtcctgcgctgggctccaggacggtcagtcctcccagatccctgctctcagctaaggctggtccctaaaacccacacctgcctttggtctctcagaggcctggcttgccctctgggcctttgctcccccgctgggtgcccggcctggaacacaggttctgtctggctgtgtgagtggcgtctctcccttcctttgagggaagctcagctttcttacgcgctcatcgttggacgggctgccatgcattgcgtgcttactgggcgccaggtgctgtgctgggcccttgtgagtgtgggggcacaggctgaattagatgagctcctgccgcagggggccctgcacactgatgtcagctcaccagtctcttccctgacagggcagctcagggaacttctgagaagttatctgcagagagccccacctcactccctttggctaccctggccgtgcctggcagcccctcaggccccacaggtgggtcctggttgtgaagtggagttagtgcacatggatgtcaggggacgggtgtgaggcatgagctgggggggccccctttttcagggcagagaatgaggcgtgtgcactgtctgctgtggggatggtgtgtttatggccatgtaagtggcaggtgtgtgtaaagatgtgcttgtgggtggtgggtgtgtctgagggggtgtgtttgggagcctggcctccaaaagccagtgtctgggttggagacagtgcaggccccttcttggccccaccctctaccccattccttcctgtcagccccagtctgtcttggcactggccaggcttgggtggagcctgtgtcccagacagatcccctaggcctatctgagacccatgcaggcccacacctgagctcctgtctgcctgaggagggaaagggggagtggccaggtcaggcaggccagtcgtctacacacccccttggtacccattcccatttcacaaactcctccaaaccccaaaccccaaacggaaatctctgggacaatggctcctccagagggcccctcagagccaggtgctggccagatgccttgatcacagcctccatggccaggggcctgtcaagccaggggcccacacacctggtgccagggtccaccttggtataccagctcggcagaacagttccccacccagcgattagggagctgggctggccagtacagccagtggggagtgggtgggaggcaccaaaacttggcagctgtgccagaaaccaaagccaggcccagatgtagggggagggcacgagagctgaacctgagcctggggcgtctcggagctggatccccgtcagctcatccaggctggacaaaccagttcctgggtcccccagccggctgggtggctctggggccaaccgaccacaggtgtcactgatcacaggtgtcaccgtagtggctaccacctcagggcagcccctccctccagctggcggggcctcagcttcccagctgccctggcttagccttccctgcagcccctccccaacaggcttggtccgggcagcctgctctgcggaaggtggcagcctcctggtgctgggctccctgcctctggggcctccagtccttcactcagtgtcatcccttccagcagctccctgggcctcttggtccatcccttcaggcttctgacacactagtggcctcgagtcactgatagtggtgcctcctccttaccttggcaagcccttgtagccctctgagccctcatcctgcaggcagagcccctcagtgctctgagaaacctgccctgaactcaccgcctcccctgcctgggcactccctcctccctgcgcccacagcccccatgccaatctccgtcagctctttctgtgctgctgtaattgttggtttgcctgtctcctttgagctgtgggcattgccggggtagggtggtgtcttcaccacagctccagaaggcactggtgggatgtggagtcaggagcaaccagagaccccccaatactagaatgggtttgagcttggggtggggtggatggggaagacttactctgaatgttcgttcaccatccgtgggcaccaggtctgtgccaagcacagggactccaggggcagctgccattcgttccagtgatgtatttggggccttctcaggtgaggaagccaaggtggccaaggccctcggtcccctgccctgatagggcttacctgtgggtgggggagggagaccacacatgtcagaggtagtgaaggccgctccaaatagtgactggggccaggcaggcggaaaagagaacagaagagaatccagaagtgttcagacagaactagggacaacagaggggcctccatggtggcatgggtcagcagagcatggagcaggcagaggaagcctatctgtggggctgggtacatttctctgagactcacggaatgtaagtgttgaggtttctgcaaagagggcgcaggccctgcagtgacggttcagatattgataacccatcccccttggcaggtgggggcttaggcatccatattggattcagaaaagaaaaagaatgatgcttcttgcaacaaaaacaaaagtgattatgtcacgagaggagaggctggagggccatgggagttcccagctggctcactcatccgtccaggaggtgggtctcatggtttcattttgctttgggcttacttagagttttggcaaatgcagagttatgtaacgaacccaacaatgaagatacagttctgtcacccccccagcattctcctgtggccctctagtccaccccccgccccaccccagcccctggcaaccactgatctgctttcacaataaccgtatggggttttttctctttccttttttgtgagcggtatttaattcctttgctctaatatgtaatattagaacatattacaaagtagcaagaaaaatacgacattggtgtaaaaataatctacacctcatggaaagaatgaagagccagaaatagattctattctgtagaaaatcttacacaataaaggacttcaaaataagggtaaggaaggatgctttaacaag

SEQ ID NO: 295 - DNA, 1236 bp, Homo sapiens
atgtctcccgcccggctccggccccgactgcacttctgcctggtcctgttgctgctgctggtggtgccggcggcatggggctgcgggccgggtcgggtggtgggcagccgccggcgaccgccacgcaaactcgtgccgctcgcctacaagcagttcagccccaatgtgcccgagaagaccctgggcgccagcggacgctatgaaggcaagatcgctcgcagctccgagcgcttcaaggagctcacccccaattacaatccagacatcatcttcaaggacgaggagaacacaggcgccgaccgcctcatgacccagcgctgcaaggaccgcctgaactcgctggctatctcggtgatgaaccagtggcccggtgtgaagctgcgggtgaccgagggctgggacgaggacggccaccactcagaggagtccctgcattatgagggccgcgcggtggacatcaccacatcagaccgcgaccgcaataagtatggactgctggcgcgcttggcagtggaggccggctttgactgggtgtattacgagtcaaaggcccacgtgcattgctccgtcaagtccgagcactcggccgcagccaagacgggcggctgcttccctgccggagcccaggtacgcctggagagtggggcgcgtgtggccttgtcagccgtgaggccgggagaccgtgtgttggccatgggggaggatgggagccccaccttcagcgatgtgctcattttactggaccgcgagccccacaggctgagagccttccaggtcatcgagactcaggaccccccacgccgcctggcactcacacccgctcacttgctctttacggctgacaatcacacggagccggcagcccgcttccgggccacatttgccagccacgtgcagcctggccagtacgtgctggtggctggggcgccaggcctgcagcctgcccgcgtggcagctgtctctacacacgtggccctcggggcctacgccccgctcacaaagcatgggacactggtggtggaggatgtggtggcatcctgcttcgcggccgtggctgaccaccacctggctcagttggccttctggcccctgagactctttcacagcttggcatggggcagctggaccccgggggagggtgtgcattggtacccccagctgctctaccgcctggggcgtctcctgctagaagagggcagcttccacccactgggcatgtccggggcagggagctga

SEQ ID NO: 296 - DNA, 3347 bp, Homo sapiens
gagaggccggcgtctctcccccagtttgccgttcacccggagcgctcgggacttgccgatagtggtgacggcggcaacatgtctgtggctttcgcggccccgaggcagcgaggcaagggggagatcactcccgctgcgattcagaagatgttggatgacaataaccatcttattcagtgtataatggactctcagaataaaggaaagacctcagagtgttctcagtatcagcagatgttgcacacaaacttggtataccttgctacaatagcagattctaatcaaaatatgcagtctcttttaccagcaccacccacacagaatatgcctatgggtcctggagggatgaatcagagcggccctcccccacctccacgctctcacaacatgccttcagatggaatggtaggtgggggtcctcctgcaccgcacatgcagaaccagatgaacggccagatgcctgggcctaaccatatgcctatgcagggacctggacccaatcaactcaatatgacaaacagttccatgaatatgccttcaagtagccatggatccatgggaggttacaaccattctgtgccatcatcacagagcatgccagtacagaatcagatgacaatgagtcagggacaaccaatgggaaactatggtcccagaccaaatatgagtatgcagccaaaccaaggtccaatgatgcatcagcagcctccttctcagcaatacaatatgccacagggaggcggacagcattaccaaggacagcagccacctatgggaatgatgggtcaagttaaccaaggcaatcatatgatgggtcagagacagattcctccctatagacctcctcaacagggcccaccacagcagtactcaggccaggaagactattacggggaccaatacagtcatggtggacaaggtcctccagaaggcatgaaccagcaatattaccctgatggaaattcacagtatggccaacagcaagatgcataccagggaccacctccacaacagggatatccaccccagcagcagcagtacccagggcagcaaggttacccaggacagcagcagggctacggtccttcacagggtggtccaggtcctcagtatcctaactacccacagggacaaggtcagcagtatggaggatatagaccaacacagcctggaccaccacagccaccccagcagaggccttatggatatgaccagggacagtatggaaattaccagcagtgaaaaagtacttacattccagtagccagtatctattagcagccatattgtcacctcagcactgtggacacctccctgtgaagagatccttccattccatctagtttttggaaaaaccttgtggataagtggctgtttcatcagtaagcagcctttgtggtttagttataaaaggctttagtagctcaaaaatactcttgatttcacatttctactctagatggcaacattggacagaaaatgcaatgacataaccaatttgtaatgattttggaactgtgtttcaaatggactgttacagactgaaaggtgtgaacagctttgtatgtttatgaagggtaagggaatttaatacttttccacagatttttttgtaaggggaagagggaaatgtacactttttacagcagcaatattttgtatattatgtttatttcatgtggtgaatatgcaaggcggtacactacgcactggacagcatcagaaatcctctgttaatgtggactggagcatggtagatgcttgattgttttggtctcaaaatggtgtgctataaagataaaggtgaggggaagacaaagcacaccatatgtccactgttctgttctcatagaggaaattcaaatcccttttatctattagataatcaagggcactgtgatacagttttgagtaaaaagacattttttaaaagccttccagttttgtggattaaacctttttataaagatcatttataatactgttttaaaatgtgaggcaataagaattactttgtgttggatctgaggaggctttggtaaaacagtttcatctaaatgaaagtggtaatcctcttctaaaatagcaataactgaaaatgaaagtgttaattttaccttgtttgagttatcagggaacttagtaagtaatatcaaagcattttataaatgatatcaaagaagagtcaacattgatccagtcattttattttgtaatattgagggataattggttattaaactgaatagttcaggagactttacaaacctttgtttcaactttcttatctggaaataatatcatttataaagggacacttttatgtttttcccttttttatgttggttgatataacacaaagagatatttaggaaaatgcttattgatgaggtttattctatctgtttttaaagcaccgaggttgcattctagataaccttgtttattagcatggcatattttaatcattatttgagactgtcctgtgcctgattattttagctaaattcagggagattgcgtggggcaggaaagcatgcattgaaaaatttctaaccacggttatttaagcataatctgaaaacatctagcccaaaggtaagttgctattttcatcacagttgcctatgcccagggaataagatgtattctttataattgaattggtttttcccacgtctaactggaaacaaaacagaaggggcgtcataaatttgaataagcagaacatactgttctcaacatactgtaatcaaaaggaggaatttcagtgggtctctgtgtgtgtatgagagagagagtgtgtgtttgtgtgtttcaaggtcagaacaggtttttttgtttttgttttttgttctttgtttttttttttgagatggagtcttgctcttgtcgcccaggctggagtgcagtggcgcaatctcagctcactgcaacctccgcctcccaggttcaagcagttctcctgcctcagcctcctgagtagctgggatgacaggcacccgccaccacacccagctaatttttgtacttttagtagagacgaggtttcgccatgttggccaggctggtctcgaactcctgacctcaggtgatccacccgcctcggccttccaaagtgctgggattacaggcgtgagccaccgtgcctggccagaataggttttttctttcaacttgatcagtagaaaatggacatcaagtttgaacagataaatcatggacagccttattgtgattgaaatgcttgtaggttctgtgccaattttccaccactgtgtactttgttgctatttaaaactgtatcaactctaacggaagaataaattatttgtgattttaaaaaa

SEQ ID NO: 297 - DNA, 2262 bp, Homo sapiens
gggggctttgcggctgtcgtcaagcgcggcgttgggccggcgggcgggggctgaggggctgccatggcggcggcgggccggctcccgagctcctgggccctcttctcgccgctcctcgcagggcttgcactactgggagtcgggccggtcccagcgcgggcgctgcacaacgtcacggccgagctctttggggccgaggcctggggcacccttgcggctttcggggacctcaactccgacaagcagacggatctcttcgtgctgcgggaaagaaatgacttaatcgtctttttggcagaccagaatgcaccctattttaaacccaaagtaaaggtatctttcaagaatcacagtgcattgataacaagtgtagtccctggggattatgatggagattctcaaatggatgtccttctgacatatcttcccaaaaattatgccaagagtgaattaggagctgttatcttctggggacaaaatcaaacattagatcctaacaatatgaccatactcaataggacttttcaagatgagccactaattatggatttcaatggtgatctaattcctgatatttttggtatcacaaatgaatccaaccagccacagatactattaggagggaatttatcatggcatccagcattgaccactacaagtaaaatgcgaattccacattctcatgcatttattgatctgactgaagattttacagcagatttattcctgacgacattgaatgccaccactagtaccttccagtttgaaatatgggaaaatttggatggaaacttctctgtcagtactatattggaaaaacctcaaaatatgatggtggttggacagtcagcatttgcagactttgatggagatggacacatggatcatttactgccaggctgtgaagataaaaattgccaaaagagtaccatctacttagtgagatctgggatgaagcagtgggttccagtcctacaagatttcagcaataagggcacactctggggctttgtgccatttgtggatgaacagcaaccaactgaaataccaattccaattacccttcatattggagactacaatatggatggctatccagacgctctggtcatactaaagaacacatctggaagcaaccagcaggcctttttactggagaacgtcccttgtaataatgcaagctgtgaagaggcgcgtcgaatgtttaaagtctactgggagctgacagacctaaatcaaattaaggatgccatggttgccaccttctttgacatttacgaagatggaatcttggacattgtagtgctaagtaaaggatatacaaagaatgattttgccattcatacactaaaaaataactttgaagcagatgcttattttgttaaagttattgttcttagtggtctgtgttctaatgactgtcctcgtaagataacaccctttggagtgaatcaacctggaccttatatcatgtatacaactgtagatgcaaatgggtatctgaaaaatggatcagctggccaactcagccaatccgcacatttagctctccaactaccatacaacgtgcttggtttaggtcggagcgcaaattttcttgaccatctctacgttggtattccccgtccatctggagaaaaatctatacgaaaacaagagtggactgcaatcattccaaattcccagctaattgtcattccataccctcacaatgtccctcgaagttggagtgccaaactgtatcttacaccaagtaatattgttctgcttactgctatagctctcatcggtgtctgtgttttcatcttggcaataattggcattttacattggcaggaaaagaaagcagatgatagagaaaaacgacaagaagcccaccggtttcattttgatgctatgtgacttgcctttaatattacataatggaatggctgttcacttgattagttgaaacacaaattctggcttgaaaaaataggggagattaaatattatttataaatgatgtatcccatggtaattattggaaagtattcaaataaatatggtttgaatatgtcacaaggtctttttttttaaagcactttgtatataaaaatttgggttctctattctgtagtgctgtacatttttgttcctttgtggaatgtgttgcatgtactccagtgtttgtgtatttataatcttatttgcatcatgatgatggaaaaagttgtgtaaataaaaataattaaaaaaaaaaaaaaaaaaaaaaaaaaaaaa

SEQ ID NO: 298 - DNA, 1892 bp, Homo sapiens
gggagccggtaccgaggcccgagccgcgggagtcgagcgaagacagcgccgaggccgcggtttccccctgggcctccccagcagcgccatgggcatcaaatttttagaagttatcaaaccattctgtgcagttctaccagaaattcagaaaccggaaaggaaaatccagtttagagagaaggttctgtggactgctataacgctcttcattttcttagtgtgttgtcagatcccactgtttggaatcatgtcatcagattctgcagatcctttctactggatgagagttattctggcttccaatagaggaactttaatggaattgggtatctccccaattgtaacatctggtttgattatgcagttgttagctggtgccaaaatcattgaagttggagatacaccgaaagatagagctttattcaatggagcccagaaactgtttggtatgatcattaccattgggcaagccattgtgtatgtcatgacggggatgtatggggaccctgcagaaatgggtgccggaatctgtctcctgatcatcattcagttgtttgttgctggtttgattgtgctgctgttagatgagctgctacagaagggttacggcttggggtctgggatttccctctttattgccaccaacatctgtgagaccattgtctggaaggcctttagtcccactaccattaacactggcagaggtactgagtttgagggtgcagtcatagctctgttccatttgttggccaccaggacggacaaagtccgagctttacgggaggctttttatcggcagaacttacccaatctcatgaacctcattgctacagtttttgtgtttgctgttgttatatatttccaaggatttcgcgttgatctgcccattaagtcggcccgttaccgaggacagtacagcagctaccccatcaaactcttctacacctccaacatccccatcatcctccagtcggccctggtgtccaacctgtatgttatttcccagatgctgtctgttcgatttagtggcaactttttagtaaatttactaggacagtgggccgatgtcagtgggggaggacccgcacgttcttacccagttggaggcctttgttactatctttctcctcctgagtccatgggcgccatctttgaggatcctgtccatgtcgttgtttatatcatcttcatgttggggtcatgtgcattcttctctaagacatggattgaagtgtctggttcctcagccaaagatgtagctaaacagctgaaagaacagcagatggtaatgaggggccaccgagatacctctatggttcatgagcttaataggtacatccccaccgcagctgcgtttggcggtttgtgcattggcgccctgtcagtgctggctgacttcctgggggccattggatctggcactggaattctgctagcagtcactattatttaccagtattttgaaatatttgttaaagaacaggccgaagttggtgggatgggtgctttgtttttctaaatgttcaaatatttcattttgtgcgtgtgaaagggaaaacactttgacggatcgtttttgtcagatgacactggtggctccccttttctcccctcacagtttcttgtttcgagtgctgactgacccgtttctgaaatgggcaccgagctaagtctgtgtgcagcattagtacccgctgccttaaaactcaagtttacattattcattaaaaaaagtacatctagtgttgcctgtaatgctggaaaccagtgtatctaccttgctgtgttaaatcatgacagtgagacggtgagatggattcgttttgcacacaacattcaaaacacttcatattgcccccacttgttgaaaaataaatgtagttcaaattgcc

SEQ ID NO: 299 - DNA, 2650 bp, Homo sapiens
ggagaaggcgagcgcggcagtcgcgccggcgctgggcgaggaagcggagccgggccgcctccggaaaatggctccaaaggttaaatgaagcaggaaaaatacatagatgcagccttgcagcctctccagatgtttggggataatattccagatagaaatattgatcccttggattaggtaactagtcataatgaagaaaattagtcttaaaaccttacggaaatcttttaacttgaataaaagtaaagaagaaactgatttcatggtagtacaacaaccatcgctagccagtgactttggaaaagatgattccttatttggtagctgctatggtaaagatatggccagctgcgatatcaacggtgaagatgaaaaaggcggaaaaaacagatcaaaaagcgagagcctgatgggtacgctaaaaaggcggctttctgcaaaacagaagtcaaaaggcaaggcgggcacaccctctgggagctctgccgacgaggacaccttctcctcctcctcagcacccatagtctttaaagacgtgagagctcagaggccgataaggtccacgtcgctccgcagccatcactacagtcccgcgccgtggcctctgcggcccacaaactccgaggagacctgcatcaagatggaggtgagagtcaaggccttggttcactcttccagcccgagtccagccctgaatggcgtccggaaggatttccacgacctccagtctgagaccacgtgccaggagcaagccaattcactgaagagctcggcttctcataatggagacctgcatcttcacctggatgaacatgtgcctgtcgttattggacttatgcctcaggactacattcagtatactgtgcctttagatgaggggatgtatcctttggaaggatcacggagctattgtctggacagctcttctcccatggaagtctctgcggttcctcctcaagtgggagggcgcgctttccccgaggatgagagtcaggtagaccaggacctagttgtcgccccagagatcttcgtggatcagtccgtgaatggcttgttgattggcaccacgggagtcatgttgcagagcccgagagcgggtcacgatgatgtccctccactctcaccattgctacctccaatgcagaataatcaaatccaaaggaacttcagtggactcactggcacagaagcccacgtggctgaaagtatgcgctgtcatttgaattttgatccgaactctgctcctggggttgcaagagtttatgactcagtgcaaagtagtggtcccatggttgtgacaagccttacagaggagctgaaaaaacttgcaaagcaaggatggtactggggaccaatcacacgttgggaggcagaagggaagctagcaaacgtgccagatggttcttttcttgttcgggacagttctgacgaccgttaccttttaagcttgagctttcgctcccatggtaaaacacttcacactagaattgagcactcaaatggtaggtttagcttttatgaacagccagatgtggaaggacatacgtccatagttgatctaattgagcattcaatcagggactctgaaaatggagctttttgttattcaaggtctcggctgcctggatctgcaacttaccccgtcagactgaccaacccagtgtcccggttcatgcaggtgcgctcgttgcagtacctgtgtcgttttgttatacgtcagtataccagaatagacttaattcagaaactgcctttgccaaacaaaatgaaggattatttacaggagaagcactactgaaagattgagaaccctgcatcttgcactttgggaataagaacaagagattgaaatacagtttacaaactttcattgccatcaaaatcttttgctgccataactatttcagttttatgtgtaaaagagtcatcagtttgtttaggggtggggaagtgtcagcaaggtgtcttgggtttattttggttctttaaaaaagggaagtcttgaggttttagaggtgtgaattatgtttcatcaatgtgcagaataatcacaatgtgaattatcaaattctcctcaatgccccccccgcccagtcctttgctgctatccactgtgatttttatgcattaaaagcacatttcatgtgtattcaaccctaagtaaagttgaatgaaacttaacagaatggaaattgctatgtctttttaaatggtccattttcaaaagacagtgttgaataaacatacctgtgtgataaaacacagaatttacatatacactgaagatgagtttttaatctcttactttaaaaagatttatttagaatcgtgaattgacataatcttgggtaatggaacggagatctgcaacatatcttttaacaacacttttttctaaattatttctaaggttgtgctaattcttttggttgtgaaaagttgaatttttctgttgccttcgttttcatcttctagtttgtctattttaataaatggccttacattaaaaaattgtaaagaaatgtataccaccaatttagaaattgttgccttttctgtaattaaactcgggtacaaattggcataacatgaaaacctatggaactagaattattattaaagaaatattagatgaaaaaaaaaaaaaaaa

SEQ ID NO: 300 - DNA, 2645 bp, Homo sapiens
gcggccgccatggcggagaattggaagaactgcttcgaggaggagctcatctgccctatctgcctgcacgttttcgtggagccagtgcagctgccgtgcaaacacaacttctgccggggctgcatcggcgaggcgtgggccaaggacagcggcctcgtacgctgcccagagtgcaaccaggcctacaaccagaagccgggcctggagaagaacctgaagctcaccaacatcgtggagaagttcaatgccctgcacgtggagaagccgccggcggcgctgcactgcgtgttctgccgccgcggccccccgctgcccgcgcagaaggtctgcctgcgctgcgaggcgccctgctgccagtcccacgtgcagacgcacctgcagcagccctccaccgcccgcgggcacctcctggtggaggcggacgacgtgcgggcctggagctgcccgcagcacaacgcctaccgcctctaccactgcgaggccgagcaggtggccgtgtgccagtactgctgctactacagcggcgcgcgtcagggacactcggtgtgcgacgtggagatccgaaggaatgaaatccggaagatgctcatgaagcagcaggaccggctggaggagcgagagcaggacattgaggaccagctgtacaaactcgagtcagacaagcgcctggtggaggagaaagtgaaccaactgaaggaggaagttcggctgcagtacgagaagctgcaccagctgctggacgaggacctgcggcagacagtggaggtcctagacaaggcccaggccaagttctgcagcgagaacgcagcgcaggcgctgcacctcggggagcgcatgcaggaggccaagaagctgctgggctccctgcagctgctctttgataagacggaggatgtcagcttcatgaagaacaccaagtctgtgaaaatcctgatggacaggacccagacctgcacgagcagcagcctttcccccactaagatcggccacctgaactccaagctcttcctgaacgaagtggccaagaaggagaagcagctgcggaaaatgctagaaggccccttcagcacgccggtgcccttcctgcagagtgtccccctgtacccttgcggcgtgagcagctctggggcggaaaagcgcaagcactcaacggccttcccagaggccagtttcctagagacgtcgtcgggccctgtgggcggccagtacggggcggcgggcacagccagcggtgagggccagtctgggcagcccctggggccctgcagctccacgcagcacttggtggccctgccgggcggcgcccaaccagtgcactcaagccccgtgttccccccatcgcagtatcccaatggctccgccgcccagcagcccatgctcccccagtatggcggccgcaagattctcgtctgttctgtggacaactgttactgttcttccgtggccaaccatggcggccaccagccctacccccgctccggccactttccctggacagtgccctcgcaggagtactcacacccgctcccgcccacaccctccgtcccccagtcccttcccagcctggcggtcagagactggcttgacgcctcccagcagcccggccaccaggatttctacagggtgtatgggcagccgtccaccaaacactacgtgacgagctaacgccacgcaggcggcggggcgctggggaatcttcctccccagcccccgggctcgggagttatgcatccagagacctgcccttctaccttcctcgcctcccctcttcctcattccattgccccaggtcttttccttttggattttgttttggttttggctttgtttttgatttttttttattatgaatctcctggacgcagaggtgacagtgggagctggcctgggccaggacggcaggtggccctggagatgggaaagtgtctgtgtcgaggcgctgagctctctctctgtttctccttttttcctctactccttccccttcacacccccgtggctggaaggaacctcggcttccctgaaagcttgggggtcccacccttcttaccccacccgggaggaacgcccagggccccgggcttgtttctcctcttgttttccttttgggcagtttgatcactgatcgagtaaggaatgacctttagattgtgcgacttttgtttttgtttttttaaatttttttaaaccaagaatgatttctcctgcttccttctcctcaccatcttcccagacggagttcaaaggccacttctcaagcagcttttggcaccttcagcctcagagtggaatcttttaaagacaggacccctatgtccaggaaaggggaaaaggaactttgccaatgatagtgaccacagcaaaagcaaataataataatattaataataataaagagaaataaaataataaaataaaaaacaatagcacagcccttgttgaggtcagcagggaggaggggctgcccggagttgggtccttgcctggattttgacacagcaacttcctgtagtgagcactttgtatgaatcgtggacttcctgttctcaaggcgcaggtatttattctgtatctgtctagcgcacacaccaaaatccaaccttctaataaacatgatggcgcagtcccaaaaaaaaaaaaaaaaa

SEQ ID NO: 301 - DNA, 3923 bp, Homo sapiens
aaagagcccgctccgccgagcgccgggcgacggcaggaagcccctccgcttggccagaatggagcagccgaagggagttgattggacagtcatcatcctgacctgccagtacaaggacagtgtccaggtctttcagagagaactggaagtgcggcagaagcgggagcagatccctgctgggacgctgttactggccgtggaggacccagagaagcgtgtgggcagcggaggagccaccctcaacgccctgctggtggctgctgaacacctgagtgcccgggcaggcttcactgtggtcacatccgatgtcctgcactcggcctggatcctcattctgcacatgggtcgagacttcccctttgatgactgtggcagggctttcacctgcctccccgtggagaaccccgaggcccccgtggaagccttggtctgcaacctggactgcctgctggacatcatgacctatcggctgggcccgggctccccgccaggcgtgtgggtctgcagcaccgacatgctgctgtctgttcctgcaaatcctggtatcagctgggacagcttccggggagccagagtgatcgccctcccagggagcccggcctacgctcagaatcatggcgtctacctaactgacccccagggccttgttttggacatttactaccagggcactgaggcagagattcagcggtgtgtcaggcctgatgggcgggtgccactggtctctggggttgtcttcttctctgtggagactgccgagcgcctcctagccacccacgtgagcccgcccctggatgcctgcacctacctaggcttggactccggagcccggcctgtccagctgtctctgttttttgacattctccactgcatggctgagaacgtgaccagggaggacttcctggtggggaggcccccagagttggggcaaggcgatgcagatgtagcgggttatctgcagagcgcccgggcccagctgtggagggagcttcgcgatcagccccttaccatggcctatgtctccagcggcagctacagctacatgacctcctcagccagtgagttcctgctcagcctcacactccccggggctcctggggcccagattgtgcactcccaggtggaggagcagcagcttctggcggccgggagctctgtggtcagctgcctgctggagggccctgtccagctgggtcctgggagcgtcctgcagcactgccacctgcagggccccattcacataggcgctggctgcttggtgactggcctggatacagcccactccaaggccctgcatggccgggagctgcgtgaccttgtcctgcagggacaccacacgcggctacacggctccccgggccacgccttcaccctcgttggccgtctggacagctgggagagacagggggcaggcacatatctcaacgtgccctggagtgaattcttcaagaggacaggtgttcgagcctgggacctgtgggaccctgagacgctgcccgcagagtactgccttcccagcgcccgcctctttcctgtgctccacccctcgagggagctgggaccccaggacctgctgtggatgctggaccaccaggaggatgggggcgaggccctgcgagcctggcgggcctcctggcgcctgtcctgggagcagctgcagccgtgcctggatcgggctgccacgctggcctctcgccgggacctgttcttccgccaggccctgcataaggcgcggcacgtgctggaggcccggcaggacctcagcctgcgcccgctgatctgggctgctgtccgcgagggctgccccgggcccctgctggccacgctggaccaggttgcagctggggcaggagaccctggtgtggcggcacgggcactggcctgtgtggcggacgtcctgggctgcatggcagagggccgtgggggcttgcggagcgggccagctgccaaccctgagtggatgcggcccttctcatacctggagtgtggagacctggcagcgggcgtggaggcgcttgcccaggagagggacaagtggctaagcaggccagccttgctggtgcgagcggcccgccactatgagggggctggtcagatcctgatccgccaggctgtgatgtcagcccagcactttgtctccacagagcaggtggaactgccgggacctgggcagtgggtggtggctgagtgcccggcccgtgtggatttctctgggggctggagtgacacgccaccccttgcctatgagcttggcggggctgtgctgggcctggctgtgcgagtggacggccgccggcccatcggagccagggcacgccgcatcccggagcctgagctgtggctggcggtggggcctcggcaggatgagatgactgtgaagatagtgtgccggtgcctggctgacctgcgggactactgccagcctcatgccccaggggccctgctgaaggcggccttcatctgtgcagggatcgtgcatgtccactcggaactccagctgagtgagcagctgctccgcaccttcgggggcggctttgagctgcacacctggtctgagctgccccacggctctggcctgggcaccagcagcatcctggcaggcactgccctggctgccttgcagcgagccgcaggccgggtggtgggcacggaagccctgatccacgcagtgctgcacctggagcaggtgctcaccactggaggtggctggcaggaccaagtaggtggcctaatgcctggcatcaaggtggggcgctcccgggctcagctgccactgaaggtggaggtagaagaggtcacggtgcctgagggctttgtccagaagctcaatgaccacctgctcttggtgtacactggcaagacccgcctggctcggaacctgctgcaggatgtgctgaggagctggtatgcccgacttcctgctgtggtgcagaatgcccacagcctggtacggcaaactgaggagtgtgctgaaggcttccgccaaggaagcctgcctctgctgggccagtgcctgacctcgtactgggagcagaagaagctcatggctccaggctgtgagcccctgactgtgcggcgtatgatggatgtcctggccccccacgtgcatggccagagcctggctggggcaggcggtggaggctttctctatctgttgaccaaggagccacagcaaaaggaggccttggaggcggtgctggccaagaccgagggccttgggaattacagcatccacctggttgaagtggacactcagggcctgagcctgaagctgctggggaccgaggcctcaacctgttgccctttcccatgaagctggcttctctctgcaacaggagaaaacctggagctacagtgtcccccaccttccttgccccatgggaacctccacctcctactccccacccacctctgcgaatctgctcccaaaggaagctgaccagagcaagatctgggcaagcagagagtgcctgggacaggactgtgacctggtggacaggggcctagatgtagcctctgttcctcctggacataggaaggtcccaagcttagtatcccacgtggcctttacaaatcctatggctggccttctcattccacaagggccctggaaagggttgacagccagccttggcatatggctgggagtcccttagcaaggccaaccctgaagaggccctttgaggcattccctatggcttagagttgtagacttacactcaaccctcatgtgagcgtgggagtgagggtggcggtcccttgccaagttggtagcagtgacccagtgattcactgccatcccaggccttaactagcaaaactacggagcgtgccaagtgacctggtgcctgtgggaagtgggttctcaggactggcattcttggaataaattcactctgtccttgcaaaaaaaaaaaaaaaaa

SEQ ID NO: 302 - DNA, 2712 bp, Homo sapiens
ctcccgcgcgcgggctcaactttgtagagcgaggggccaacttggcagagcgcgcggccagctttgcagagagcgccctccagggactatgcgtgcggggacacgggtcgctttgggctcttccacccctgcggagcgcactaccccgagccaggggcggtgcaagccccgcccggccctacccagggcggctcctccctccgcagcgccgagacttttagtttcgctttcgctaaaggggccccagacccttgctgcggagcgacggagagagactgtgccagtcccagccgccctaccgccgtgggaacgatgctgtaatggactgtgttggttggcctccaggcaggaagtggcacttggaaaagaacaccagctgcggtggtagcagtgggatttgtgcttcttatgttacccagatggcagatgatcagggctgtattgaagagcagggggttgaggattcagcaaatgaagattcagtggatgctaagccagaccggtcctcgtttgtaccgtccctcttcagtaagaagaagaaaaatgtcaccatgcgatccatcaagaccacccgggaccgagtgcctacatatcagtacaacatgaattttgaaaagctgggcaaatgcatcataataaacaacaagaactttgataaagtgacaggtatgggcgttcgaaacggaacagacaaagatgccgaggcgctcttcaagtgcttccgaagcctgggttttgacgtgattgtctataatgactgctcttgtgccaagatgcaagatctgcttaaaaaagcttctgaagaggaccatacaaatgccgcctgcttcgcctgcatcctcttaagccatggagaagaaaatgtaatttatgggaaagatggtgtcacaccaataaaggatttgacagcccactttaggggggatagatgcaaaacccttttagagaaacccaaactcttcttcattcaggcttgccgagggaccgagcttgatgatggcatccaggccgactcggggcccatcaatgacacagatgctaatcctcgatacaagatcccagtggaagctgacttcctcttcgcctattccacggttccaggctattactcgtggaggagcccaggaagaggctcctggtttgtgcaagccctctgctccatcctggaggagcacggaaaagacctggaaatcatgcagatcctcaccagggtgaatgacagagttgccaggcactttgagtctcagtctgatgacccacacttccatgagaagaagcagatcccctgtgtggtctccatgctcaccaaggaactctacttcagtcaatagccatatcaggggtacattctagctgagaagcaatgggtcactcattaatgaatcacatttttttatgctcttgaaatattcagaaattctccaggattttaatttcaggaaaatgtattgattcaacagggaagaaactttctggtgctgtcttttgttctctgaattttcagagactttttttataatgttattcatttggtgactgtgtaactttctcttaagattaattttctctttgtatgtctgttaccttgttaatagacttaatacatgcaacagaagtgacttctggagaaagctcatggctgtgtccactgcaattggtggtaacagtggtagagtcatgtttgcacttggcaaaaagaatcccaatgtttgacaaaacacagccaaggggatatttactgctctttattgcagaatgtgggtattgagtgtgatttgaatgatttttcattggcttagggcagattttcatgcaaaagttctcatatgagttagaggagaaaaagcttaatgattctgatatgtatccatcaggatccagtctggaaaacagaaaccattctaggtgtttcaacagagggagtttaatacaggaaattgacttacatagatgataaaagagaagccaaacagcaagaagctgttaccacacccagggctatgaggataatgggaagaggtttggtttcctgtgtccagtagtgggatcatccagaggagctggaaccatggtgggggctgcctagtgggagttaggaccaccaatggattgtggaaaatggagccatgacaagaacaaagccactgactgagatggagtgagctgagacagataagagaataccttggtctcacctatcctgccctcacatcttccaccagcaccttactgcccaggcctatctggaagccacctcaccaaggaccttggaagagcaagggacagtgaggcaggagaagaacaagaaatggatgtaagcctggcccataatgtgaacataagtaatcactaatgctcaacaatttatccattcaatcatttattcattgggttgtcagatagtctatgtatgtgtaaaacaatctgttttggctttatgtgcaaaatctgttatagctttaaaatatatctggaactttttagattattccaagccttattttgagtaaatatttgttacttttagttctataagtgaggaagagtttatggcaaagatttttggcactttgttttcaagatggtgttatcttttgaattcttgataaatgactgtttttttctgcctaatagtaactggttaaaaaacaaatgttcatatttattgattaaaaatgtggttgcttaattcctaaaaaaaaaaaaaaaaaa

SEQ ID NO: 303 - DNA, 1236 bp, Homo sapiens
gggggccgcgagcactggcgggttctgggtcctgtgaccggtcaggcggcgtcagcgggcgcggcggagggctggccggcctcgggggagtttccgcggccgccgggggcgcggcggcagagcgcgaggccgggcagggggccagactcggagtcgaggcgcgcccgacagccgcagcgctcatggcgggcggaggagccggggaccccggcctgggggcggccgccgccccagcgcccgagacccgcgagcacctcttcaaggtgctggtgatcggcgagcttggcgtgggcaagaccagcatcatcaagcgctacgtccaccagctcttctcccagcactaccgggccaccatcggggtggacttcgccctcaaggtcctcaactgggacagcaggactctggtgcgcctgcagctgtgggacatcgcggggcaggagcgatttggcaacatgacccgagtatactacaaggaagctgttggtgcttttgtagtctttgatatatcaagaagttccacatttgaggcagtcttaaaatggaaaagtgatctggatagtaaagttcatcttccaaatggcagccctatccctgctgtcctcttggctaacaaatgtgaccagaacaaggacagtagccagagtccttcccaggtggaccaattctgcaaagaacatggctttgccggatggtttgaaacctctgcaaaggataacataaacatagaggaagctgcccggttcctagtggagaagattcttgtaaaccaccaaagctttcctaatgaagaaaacgatgtggacaaaattaagctagatcaagagaccttgagagcagagaacaaatcccagtgttgctgatatatggcttctgcttctcttgtgtgtgcctcagctctgaagaagttcctgagaatgggttacagatgtcatgttagctgggagtcttcccacatgtggcacttcaaaaggcagcaccactgggcgcctgcacttatttgaaaatggaactttgggagaagtatccctgctagtggctctgtaacttaacagatgacaattaggcttttgtcattgttgccatcatatggaagataatgtttacatccttttaaacatttttatatgacaattcctcaggatttggtaaggcttccaagttgtagcttttagtgtaagtgctggggtggtaataaaatgttacctgcaaaaaaaaaaaaaaaaaaaaaaaaaaaaa

SEQ ID NO: 304 - DNA, 2820 bp, Homo sapiens
ggcgggttcgcgccccgaaggctgagagctggcgctgctcgtgccctgtgtgccagacggcggagctccgcggccggaccccgcggccccgctttgctgccgactggagtttgggggaagaaactctcctgcgccccagaagatttcttcctcggcgaagggacagcgaaagatgagggtggcaggaagagaaggcgctttctgtctgccggggtcgcagcgcgagagggcagtgccatgttcctctccatcctagtggcgctgtgcctgtggctgcacctggcgctgggcgtgcgcggcgcgccctgcgaggcggtgcgcatccctatgtgccggcacatgccctggaacatcacgcggatgcccaaccacctgcaccacagcacgcaggagaacgccatcctggccatcgagcagtacgaggagctggtggacgtgaactgcagcgccgtgctgcgcttcttcttctgtgccatgtacgcgcccatttgcaccctggagttcctgcacgaccctatcaagccgtgcaagtcggtgtgccaacgcgcgcgcgacgactgcgagcccctcatgaagatgtacaaccacagctggcccgaaagcctggcctgcgacgagctgcctgtctatgaccgtggcgtgtgcatttcgcctgaagccatcgtcacggacctcccggaggatgttaagtggatagacatcacaccagacatgatggtacaggaaaggcctcttgatgttgactgtaaacgcctaagccccgatcggtgcaagtgtaaaaaggtgaagccaactttggcaacgtatctcagcaaaaactacagctatgttattcatgccaaaataaaagctgtgcagaggagtggctgcaatgaggtcacaacggtggtggatgtaaaagagatcttcaagtcctcatcacccatccctcgaactcaagtcccgctcattacaaattcttcttgccagtgtccacacatcctgccccatcaagatgttctcatcatgtgttacgagtggcgttcaaggatgatgcttcttgaaaattgcttagttgaaaaatggagagatcagcttagtaaaagatccatacagtgggaagagaggctgcaggaacagcggagaacagttcaggacaagaagaaaacagccgggcgcaccagtcgtagtaatccccccaaaccaaagggaaagcctcctgctcccaaaccagccagtcccaagaagaacattaaaactaggagtgcccagaagagaacaaacccgaaaagagtgtgagctaactagtttccaaagcggagacttccgacttccttacaggatgaggctgggcattgcctgggacagcctatgtaaggccatgtgccccttgccctaacaactcactgcagtgctcttcatagacacatcttgcagcatttttcttaaggctatgcttcagtttttctttgtaagccatcacaagccatagtggtaggtttgccctttggtacagaaggtgagttaaagctggtggaaaaggcttattgcattgcattcagagtaacctgtgtgcatactctagaagagtagggaaaataatgcttgttacaattcgacctaatatgtgcattgtaaaataaatgccatatttcaaacaaaacacgtaatttttttacagtatgttttattaccttttgatatctgttgttgcaatgttagtgatgttttaaaatgtgatgaaaatataatgtttttaagaaggaacagtagtggaatgaatgttaaaagatctttatgtgtttatggtctgcagaaggatttttgtgatgaaaggggattttttgaaaaattagagaagtagcatatggaaaattataatgtgtttttttaccaatgacttcagtttctgtttttagctagaaacttaaaaacaaaaataataataaagaaaaataaataaaaaggagaggcagacaatgtctggattcctgttttttggttacctgatttccatgatcatgatgcttcttgtcaacaccctcttaagcagcaccagaaacagtgagtttgtctgtaccattaggagttaggtactaattagttggctaatgctcaagtattttatacccacaagagaggtatgtcactcatcttacttcccaggacatccaccctgagaataatttgacaagcttaaaaatggccttcatgtgagtgccaaattttgtttttcttcatttaaatattttctttgcctaaatacatgtgagaggagttaaatataaatgtacagagaggaaagttgagttccacctctgaaatgagaattacttgacagttgggatactttaatcagaaaaaaagaacttatttgcagcattttatcaacaaatttcataattgtggacaattggaggcatttattttaaaaaacaattttattggccttttgctaacacagtaagcatgtattttataaggcattcaataaatgcacaacgcccaaaggaaataaaatcctatctaatcctactctccactacacagaggtaatcactattagtattttggcatattattctccaggtgtttgcttatgcacttataaaatgatttgaacaaataaaactaggaacctgtatacatgtgtttcataacctgcctcctttgcttggccctttattgagataagttttcctgtcaagaaagcagaaaccatctcatttctaacagctgtgttatattccatagtatgcattactcaacaaactgttgtgctattggatacttaggtggtttcttcactgacaatactgaataaacatctcaccggaattc

SEQ ID NO: 305 - DNA, 3268 bp, Homo sapiens
gccggggaagtcatgctcgcttcacggaggcaatagctagccggtgtctgtgggaggttatgtttatttgagacttctccatcgggatcgcctggtgtcaccaagtgtccactggtactgaggtttgctgcctgccttcttgccatgtctaacgaagtagaaacaagtgcaaccaatggtcagcccgaccaacaggccgcaccaaaagcaccctcaaagaaggaaaaaaagaaaggccctgaaaagacagatgaatatctcctagcaaggttcaaaggcgatggcgtaaaatataaggccaagctgattggcattgatgatgtgccagatgcaagaggggataaaatgagccaagactctatgatgaaactaaagggaatggcggcacgtggtcggtctcagggacaacacaaacaaaggatctgggtcaacatttccctttctgggataaaaataattgatgagaaaactggggtaatagagcatgaacatccagtaaataagatttctttcattgcccgtgatgtgacagacaaccgggcatttggttacgtgtgtggaggagaaggccagcatcagttttttaccataaaaaccgggcaacaggctgaaccattagttgttgatcttaaagacctttttcaagttatctataatgtaaagaaaaaggaagaagaaaagaaaaagatagaggaagccagcaaagcagttgagaatgggagtgaggccctaaggattctagatgaccaaactaacaaactgaaatcgggtgttgaccagatggatttgtttggggacatgtctacacctcctgacctaaatagtccaacagaaagcaaagatatcctgttagtggatctaaactctgaaatcgacaccaatcagaattctttaagagaaaatccattcttaacaaacggcatcacctcctgttctcttcctcgaccaacgcctcaggcatccttcttgcctgaaaatgccttttctgccaatctcaacttctttcccacccctaatcctgatcctttccgtgacgatcctttcacacagccagaccaatcgacaccttcttcgtttgattctctcaaatctccagatcagaagaaagagaattcgagtagctcgtctactccgctgagtaatgggcccctgaatggtgatgttgactactttggtcagcaatttgaccagatctctaaccggactggcaaacaggaagctcaggcaggcccatggcccttttcaagttcgcaaacccagccagcagtgagaactcaaaatggggtatctgaaagagaacagaacggcttctctgtcaaatcctccccgaacccttttgtgggaagccctcccaaaggactgtccatacagaatggcgtaaagcaggacttggaaagctctgtccagtcctcaccacatgactccatagccattatcccacctccacaaagtaccaaaccaggaagaggcagaaggactgctaagtcttcagccaatgacttgcttgcatcagacatctttgctcctcccgtctcagaaccttcaggccaggcgtcacccacaggacaacctacagccctgcagcccaaccctctggatctcttcaaaacaagtgctcctgccccagtggggcccctggtgggtctaggtggtgtaactgtcacactccctcaggcaggaccatggaacacagcatctttggtcttcaatcagtccccttcaatggctccgggagccatgatgggtggtcaaccttcaggttttagtcagcccgtcatttttggtacaagtccagctgtttcaggttggaaccagccttcaccctttgcagcctcaactccccctccagtgcctgttgtctggggcccttctgcatctgtggcacccaatgcttggtcaacaacaagccctttggggaatccttttcagagcaatatttttccagctcctgctgtgtccactcagcccccatccatgcactcctctctcctggtcactcctcctcagccacctcccagagctggccctcccaaggacatctccagtgatgccttcactgccttagacccacttggggataaagagatcaaggatgtgaaagaaatgtttaaggatttccaactgcggcagccacctgctgtgcccgcgcggaagggagagcagacttcttctgggactttgagtgcctttgccagttatttcaacagcaaggttggcattcctcaggagaatgcagaccatgatgactttgatgctaatcaactattgaacaagatcaatgaaccaccaaagccagctcccagacaagtttccctgccagttaccaaatctactgacaatgcatttgagaaccctttctttaaagattcttttggttcatcacaagcctctgtggcttcttctcaacctgtatcttctgagatgtatagggatccatttggaaatccttttgcctaaattctgaacttggtctgcagaccatccagaggaataaaaaggttggccttagtagtcaaaaacaaagctgatagccagacacgttctgatttctgcccttgttccagctttgacgtattatctgttgccttatttctcattgcctcttctacttgtaaaatgcttttcactttctgtctaggttaaagctaaactgaatctatggctttaaataaattaagatcctaaactctctagcttaagtgtaaatgaagtacagtagtttccctactgaaccctacctcttgtgtccctggaaccttctagaacacctgccttctaccctctggttgggagatgcagccaccacatcccttcatatcatactgttttgaataaattttcaaatccttattgttcagagttgtttgggggttctgtttcagagcataaaacctaaaggttatagtagaacaaggcaccttcttaaaagaaatcttgcttcagaccatcagttacagagaatttcctaaagtaaaattgaagcaactacaacttctccttagacactttggaatctaaccacttaaggacctttttaaagagatagcttctcttctttctgaagatcaatttctcccaaggccaagattgtccttttctcccatttcttgctagctattgcaaatgagggaagaacattattcatctctcctccccttttttttctgattcttttttcagtcagttttgctcctgggttcaagtagtattaccaccctttcacaagcaacagactctcacagggcaaaaaaaaaaaaaaaaaaaaaaa

SEQ ID NO: 306 - DNA, 4465 bp, Homo sapiens
caattgtcatacgacttgcagtgagcgtcaggagcacgtccaggaactcctcagcagcgcctccttcagctccacagccagacgccctcagacagcaaagcctacccccgcgccgcgccctgcccgccgctcggatgctcgcccgcgccctgctgctgtgcgcggtcctggcgctcagccatacagcaaatccttgctgttcccacccatgtcaaaaccgaggtgtatgtatgagtgtgggatttgaccagtataagtgcgattgtacccggacaggattctatggagaaaactgctcaacaccggaatttttgacaagaataaaattatttctgaaacccactccaaacacagtgcactacatacttacccacttcaagggattttggaacgttgtgaataacattcccttccttcgaaatgcaattatgagttatgtcttgacatccagatcacatttgattgacagtccaccaacttacaatgctgactatggctacaaaagctgggaagccttctctaacctctcctattatactagagcccttcctcctgtgcctgatgattgcccgactcccttgggtgtcaaaggtaaaaagcagcttcctgattcaaatgagattgtggaaaaattgcttctaagaagaaagttcatccctgatccccagggctcaaacatgatgtttgcattctttgcccagcacttcacgcatcagtttttcaagacagatcataagcgagggccagctttcaccaacgggctgggccatggggtggacttaaatcatatttacggtgaaactctggctagacagcgtaaactgcgccttttcaaggatggaaaaatgaaatatcagataattgatggagagatgtatcctcccacagtcaaagatactcaggcagagatgatctaccctcctcaagtccctgagcatctacggtttgctgtggggcaggaggtctttggtctggtgcctggtctgatgatgtatgccacaatctggctgcgggaacacaacagagtatgcgatgtgcttaaacaggagcatcctgaatggggtgatgagcagttgttccagacaagcaggctaatactgataggagagactattaagattgtgattgaagattatgtgcaacacttgagtggctatcacttcaaactgaaatttgacccagaactacttttcaacaaacaattccagtaccaaaatcgtattgctgctgaatttaacaccctctatcactggcatccccttctgcctgacacctttcaaattcatgaccagaaatacaactatcaacagtttatctacaacaactctatattgctggaacatggaattacccagtttgttgaatcattcaccaggcaaattgctggcagggttgctggtggtaggaatgttccacccgcagtacagaaagtatcacaggcttccattgaccagagcaggcagatgaaataccagtcttttaatgagtaccgcaaacgctttatgctgaagccctatgaatcatttgaagaacttacaggagaaaaggaaatgtctgcagagttggaagcactctatggtgacatcgatgctgtggagctgtatcctgcccttctggtagaaaagcctcggccagatgccatctttggtgaaaccatggtagaagttggagcaccattctccttgaaaggacttatgggtaatgttatatgttctcctgcctactggaagccaagcacttttggtggagaagtgggttttcaaatcatcaacactgcctcaattcagtctctcatctgcaataacgtgaagggctgtccctttacttcattcagtgttccagatccagagctcattaaaacagtcaccatcaatgcaagttcttcccgctccggactagatgatatcaatcccacagtactactaaaagaacgttcgactgaactgtagaagtctaatgatcatatttatttatttatatgaaccatgtctattaatttaattatttaataatatttatattaaactccttatgttacttaacatcttctgtaacagaagtcagtactcctgttgcggagaaaggagtcatacttgtgaagacttttatgtcactactctaaagattttgctgttgctgttaagtttggaaaacagtttttattctgttttataaaccagagagaaatgagttttgacgtctttttacttgaatttcaacttatattataagaacgaaagtaaagatgtttgaatacttaaacactatcacaagatggcaaaatgctgaaagtttttacactgtcgatgtttccaatgcatcttccatgatgcattagaagtaactaatgtttgaaattttaaagtacttttggttatttttctgtcatcaaacaaaaacaggtatcagtgcattattaaatgaatatttaaattagacattaccagtaatttcatgtctactttttaaaatcagcaatgaaacaataatttgaaatttctaaattcatagggtagaatcacctgtaaaagcttgtttgatttcttaaagttattaaacttgtacatataccaaaaagaagctgtcttggatttaaatctgtaaaatcagatgaaattttactacaattgcttgttaaaatattttataagtgatgttcctttttcaccaagagtataaacctttttagtgtgactgttaaaacttccttttaaatcaaaatgccaaatttattaaggtggtggagccactgcagtgttatctcaaaataagaatattttgttgagatattccagaatttgtttatatggctggtaacatgtaaaatctatatcagcaaaagggtctacctttaaaataagcaataacaaagaagaaaaccaaattattgttcaaatttaggtttaaacttttgaagcaaacttttttttatccttgtgcactgcaggcctggtactcagattttgctatgaggttaatgaagtaccaagctgtgcttgaataacgatatgttttctcagattttctgttgtacagtttaatttagcagtccatatcacattgcaaaagtagcaatgacctcataaaatacctcttcaaaatgcttaaattcatttcacacattaattttatctcagtcttgaagccaattcagtaggtgcattggaatcaagcctggctacctgcatgctgttccttttcttttcttcttttagccattttgctaagagacacagtcttctcatcacttcgtttctcctattttgttttactagttttaagatcagagttcactttctttggactctgcctatattttcttacctgaacttttgcaagttttcaggtaaacctcagctcaggactgctatttagctcctcttaagaagattaaaagagaaaaaaaaaggcccttttaaaaatagtatacacttattttaagtgaaaagcagagaattttatttatagctaattttagctatctgtaaccaagatggatgcaaagaggctagtgcctcagagagaactgtacggggtttgtgactggaaaaagttacgttcccattctaattaatgccctttcttatttaaaaacaaaaccaaatgatatctaagtagttctcagcaataataataatgacgataatacttcttttccacatctcattgtcactgacatttaatggtactgtatattacttaatttattgaagattattatttatgtcttattaggacactatggttataaactgtgtttaagcctacaatcattgatttttttttgttatgtcacaatcagtatattttctttggggttacctctctgaatattatgtaaacaatccaaagaaatgattgtattaagatttgtgaataaatttttagaaatctgattggcatattgagatatttaaggttgaatgtttgtccttaggataggcctatgtgctagcccacaaagaatattgtctcattagcctgaatgtgccataagactgaccttttaaaatgttttgagggatctgtggatgcttcgttaatttgttcagccacaatttattgagaaaatattctgtgtcaagcactgtgggttttaatatttttaaatcaaacgctgattacagataatagtatttatataaataattgaaaaaaattttcttttgggaagagggagaaaatgaaataaatatcattaaagataactcaggagaatcttctttacaattttacgtttagaatgtttaaggttaagaaagaaatagtcaatatgcttgtataaaacactgttcactgttttttttaaaaaaaaaacttgatttgttattaacattgatctgctgacaaaacctgggaatttgggttgtgtatgcgaatgtttcagtgcctcagacaaatgtgtatttaacttatgtaaaagataagtctggaaataaatgtctgtttatttttgtactattta

SEQ ID NO: 307 - DNA, 11185 bp, Homo sapiens
gctgccccgagcctttctggggaagaactccaggcgtgcggacgcaacagccgagaacattaggtgttgtggacaggagctgggaccaagatcttcggccagccccgcatcctcccgcatcttccagcaccgtcccgcaccctccgcatccttccccgggccaccacgcttcctatgtgacccgcctgggcaacgccgaacccagtcgcgcagcgctgcagtgaattttccccccaaactgcaataagccgccttccaaggccaagatgttcataaatataaagagcatcttatggatgtgttcaaccttaatagtaacccatgcgctacataaagtcaaagtgggaaaaagcccaccggtgaggggctccctctctggaaaagtcagcctaccttgtcatttttcaacgatgcctactttgccacccagttacaacaccagtgaatttctccgcatcaaatggtctaagattgaagtggacaaaaatggaaaagatttgaaagagactactgtccttgtggcccaaaatggaaatatcaagattggtcaggactacaaagggagagtgtctgtgcccacacatcccgaggctgtgggcgatgcctccctcactgtggtcaagctgctggcaagtgatgcgggtctttaccgctgtgacgtcatgtacgggattgaagacacacaagacacggtgtcactgactgtggatggggttgtgtttcactacagggcggcaaccagcaggtacacactgaattttgaggctgctcagaaggcttgtttggacgttggggcagtcatagcaactccagagcagctctttgctgcctatgaagatggatttgagcagtgtgacgcaggctggctggctgatcagactgtcagatatcccatccgggctcccagagtaggctgttatggagataagatgggaaaggcaggagtcaggacttatggattccgttctccccaggaaacttacgatgtgtattgttatgtggatcatctggatggtgatgtgttccacctcactgtccccagtaaattcaccttcgaggaggctgcaaaagagtgtgaaaaccaggatgccaggctggcaacagtgggggaactccaggcggcatggaggaacggctttgaccagtgcgattacgggtggctgtcggatgccagcgtgcgccaccctgtgactgtggccagggcccagtgtggaggtggtctacttggggtgagaaccctgtatcgttttgagaaccagacaggcttccctccccctgatagcagatttgatgcctactgctttaaacctaaagaggctacaaccatcgatttgagtatcctcgcagaaactgcatcacccagtttatccaaagaaccacaaatggtttctgatagaactacaccaatcatccctttagttgatgaattacctgtcattccaacagagttccctcccgtgggaaatattgtcagttttgaacagaaagccacagtccaacctcaggctatcacagatagtttagccaccaaattacccacacctactggcagtaccaagaagccctgggatatggatgactactcaccttctgcttcaggacctcttggaaagctagacatatcagaaattaaggaagaagtgctccagagtacaactggcgtctctcattatgctacggattcatgggatggtgtcgtggaagataaacaaacacaagaatcggttacacagattgaacaaatagaagtgggtcctttggtaacatctatggaaatcttaaagcacattccttccaaggaattccctgtaactgaaacaccattggtaactgcaagaatgatcctggaatccaaaactgaaaagaaaatggtaagcactgtttctgaattggtaaccacaggtcactatggattcaccttgggagaagaggatgatgaagacagaacacttacagttggatctgatgagagcaccttgatctttgaccaaattcctgaagtcattacggtgtcaaagacttcagaagacaccatccacactcatttagaagacttggagtcagtctcagcatccacaactgtttcccctttaattatgcctgataataatggatcatccatggatgactgggaagagagacaaactagtggtaggataacggaagagtttcttggcaaatatctgtctactacaccttttccatcacagcatcgtacagaaatagaattgtttccttattctggtgataaaatattagtagagggaatttccacagttatttatccttctctacaaacagaaatgacacatagaagagaaagaacagaaacactaataccagagatgagaacagatacttatacagatgaaatacaagaagagatcactaaaagtccatttatgggaaaaacagaagaagaagtcttctctgggatgaaactctctacatctctctcagagccaattcatgttacagagtcttctgtggaaatgaccaagtcttttgatttcccaacattgataacaaagttaagtgcagagccaacagaagtaagagatatggaggaagactttacagcaactccaggtactacaaaatatgatgaaaatattacaacagtgcttttggcccatggtactttaagtgttgaagcagccactgtatcaaaatggtcatgggatgaagataatacaacatccaagcctttagagtctacagaaccttcagcctcttcaaaattgccccctgccttactcacaactgtggggatgaatggaaaggataaagacatcccaagtttcactgaagatggagcagatgaatttactcttattccagatagtactcaaaagcagttagaggaggttactgatgaagacatagcagcccatggaaaattcacaattagatttcagccaactacatcaactggtattgcagaaaagtcaactttgagagattctacaactgaagaaaaagttccacctatcacaagcactgaaggccaagtttatgcaaccatggaaggaagtgctttgggtgaagtagaagatgtggacctctctaagccagtatctactgttccccaatttgcacacacttcagaggtggaaggattagcatttgttagttatagtagcacccaagagcctactacttatgtagactcttcccataccattcctctttctgtaattcccaagacagactggggagtgttagtaccttctgttccatcagaagatgaagttctaggtgaaccctctcaagacatacttgtcattgatcagactcgccttgaagcgactatttctccagaaactatgagaacaacaaaaatcacagagggaacaactcaggaagaattcccttggaaagaacagactgcagagaaaccagttcctgctctcagttctacagcttggactcccaaggaggcagtaacaccactggatgaacaagagggcgatggatcagcatatacagtctctgaagatgaattgttgacaggttctgagagggtcccagttttagaaacaactccagttggaaaaattgatcacagtgtgtcttatccaccaggtgctgtaactgagcacaaagtgaaaacagatgaagtggtaacactaacaccacgcattgggccaaaagtatctttaagtccagggcctgaacaaaaatatgaaacagaaggtagtagtacaacaggatttacatcatctttgagtccttttagtacccacattacccagcttatggaagaaaccactactgagaaaacatccctagaggatattgatttaggctcaggattatttgaaaagcccaaagccacagaactcatagaattttcaacaatcaaagtcacagttccaagtgatattaccactgccttcagttcagtagacagacttcacacaacttcagcattcaagccatcttccgcgatcactaagaaaccacctctcatcgacagggaacctggtgaagaaacaaccagtgacatggtaatcattggagaatcaacatctcatgttcctcccactacccttgaagatattgtagccaaggaaacagaaaccgatattgatagagagtatttcacgacttcaagtcctcctgctacacagccaacaagaccacccactgtggaagacaaagaggcctttggacctcaggcgctttctacgccacagcccccagcaagcacaaaatttcaccctgacattaatgtttatattattgaggtcagagaaaataagacaggtcgaatgagtgatttgagtgtaattggtcatccaatagattcagaatctaaagaagatgaaccttgtagtgaagaaacagatccagtgcatgatctaatggctgaaattttacctgaattccctgacataattgaaatagacctataccacagtgaagaaaatgaagaagaagaagaagagtgtgcaaatgctactgatgtgacaaccaccccatctgtgcagtacataaatgggaagcatctcgttaccactgtgcccaaggacccagaagctgcagaagctaggcgtggccagtttgaaagtgttgcaccttctcagaatttctcggacagctctgaaagtgatactcatccatttgtaatagccaaaacggaattgtctactgctgtgcaacctaatgaatctacagaaacaactgagtctcttgaagttacatggaagcctgagacttaccctgaaacatcagaacatttttcaggtggtgagcctgatgttttccccacagtcccattccatgaggaatttgaaagtggaacagccaaaaaaggggcagaatcagtcacagagagagatactgaagttggtcatcaggcacatgaacatactgaacctgtatctctgtttcctgaagagtcttcaggagagattgccattgaccaagaatctcagaaaatagcctttgcaagggctacagaagtaacatttggtgaagaggtagaaaaaagtacttctgtcacatacactcccactatagttccaagttctgcatcagcatatgtttcagaggaagaagcagttaccctaataggaaatccttggccagatgacctgttgtctaccaaagaaagctgggtagaagcaactcctagacaagttgtagagctctcagggagttcttcgattccaattacagaaggctctggagaagcagaagaagatgaagatacaatgttcaccatggtaactgatttatcacagagaaatactactgatacactcattactttagacactagcaggataatcacagaaagcttttttgaggttcctgcaaccaccatttatccagtttctgaacaaccttctgcaaaagtggtgcctaccaagtttgtaagtgaaacagacacttctgagtggatttccagtaccactgttgaggaaaagaaaaggaaggaggaggagggaactacaggtacggcttctacatttgaggtatattcatctacacagagatcggatcaattaattttaccctttgaattagaaagtccaaatgtagctacatctagtgattcaggtaccaggaaaagttttatgtccttgacaacaccaacacagtctgaaagggaaatgacagattctactcctgtctttacagaaacaaatacattagaaaatttgggggcacagaccactgagcacagcagtatccatcaacctggggttcaggaagggctgaccactctcccacgtagtcctgcctctgtctttatggagcagggctctggagaagctgctgccgacccagaaaccaccactgtttcttcattttcattaaacgtagagtatgcaattcaagccgaaaaggaagtagctggcactttgtctccgcatgtggaaactacattctccactgagccaacaggactggttttgagtacagtaatggacagagtagttgctgaaaatataacccaaacatccagggaaatagtgatttcagagcgattaggagaaccaaattatggggcagaaataaggggcttttccacaggttttcctttggaggaagatttcagtggtgactttagagaatactcaacagtgtctcatcccatagcaaaagaagaaacggtaatgatggaaggctctggagatgcagcatttagggacacccagacttcaccatctacagtacctacttcagttcacatcagtcacatatctgactcagaaggacccagtagcaccatggtcagcacttcagccttcccctgggaagagtttacatcctcagctgagggctcaggtgagcaactggtcacagtcagcagctctgttgttccagtgcttcccagtgctgtgcaaaagttttctggtacagcttcctccattatcgacgaaggattgggagaagtgggtactgtcaatgaaattgatagaagatccaccattttaccaacagcagaagtggaaggtacgaaagctccagtagagaaggaggaagtaaaggtcagtggcacagtttcaacaaactttccccaaactatagagccagccaaattatggtctaggcaagaagtcaaccctgtaagacaagaaattgaaagtgaaacaacatcagaggaacaaattcaagaagaaaagtcatttgaatcccctcaaaactctcctgcaacagaacaaacaatctttgattcacagacatttactgaaactgaactcaaaaccacagattattctgtactaacaacaaagaaaacttacagtgatgataaagaaatgaaggaggaagacacttctttagttaacatgtctactccagatccagatgcaaatggcttggaatcttacacaactctccctgaagctactgaaaagtcacattttttcttagctactgcattagtaactgaatctataccagctgaacatgtagtcacagattcaccaatcaaaaaggaagaaagtacaaaacattttccgaaaggcatgagaccaacaattcaagagtcagatactgagctcttattctctggactgggatcaggagaagaagttttacctactctaccaacagagtcagtgaattttactgaagtggaacaaatcaataacacattatatccccacacttctcaagtggaaagtacctcaagtgacaaaattgaagactttaacagaatggaaaatgtggcaaaagaagttggaccactcgtatctcaaacagacatctttgaaggtagtgggtcagtaaccagcacaacattaatagaaattttaagtgacactggagcagaaggacccacggtggcacctctccctttctccacggacatcggacatcctcaaaatcagactgtcaggtgggcagaagaaatccagactagtagaccacaaaccataactgaacaagactctaacaagaattcttcaacagcagaaattaacgaaacaacaacctcatctactgattttctggctagagcttatggttttgaaatggccaaagaatttgttacatcagcaccaaaaccatctgacttgtattatgaaccttctggagaaggatctggagaagtggatattgttgattcatttcacacttctgcaactactcaggcaaccagacaagaaagcagcaccacatttgtttctgatgggtccctggaaaaacatcctgaggtgccaagcgctaaagctgttactgctgatggattcccaacagtttcagtgatgctgcctcttcattcagagcagaacaaaagctcccctgatccaactagcacactgtcaaatacagtgtcatatgagaggtccacagacggtagtttccaagaccgtttcagggaattcgaggattccaccttaaaacctaacagaaaaaaacccactgaaaatattatcatagacctggacaaagaggacaaggatttaatattgacaattacagagagtaccatccttgaaattctacctgagctgacatcggataaaaatactatcatagatattgatcatactaaacctgtgtatgaagacattcttggaatgcaaacagatatagatacagaggtaccatcagaaccacatgacagtaatgatgaaagtaatgatgacagcactcaagttcaagagatctatgaggcagctgtcaacctttctttaactgaggaaacatttgagggctctgctgatgttctggctagctacactcaggcaacacatgatgaatcaatgacttatgaagatagaagccaactagatcacatgggctttcacttcacaactgggatccctgctcctagcacagaaacagaattagacgttttacttcccacggcaacatccctgccaattcctcgtaagtctgccacagttattccagagattgaaggaataaaagctgaagcaaaagccctggatgacatgtttgaatcaagcactttgtctgatggtcaagctattgcagaccaaagtgaaataataccaacattgggccaatttgaaaggactcaggaggagtatgaagacaaaaaacatgctggtccttcttttcagccagaattctcttcaggagctgaggaggcattagtagaccatactccctatctaagtattgctactacccaccttatggatcagagtgtaacagaggtgcctgatgtgatggaaggatccaatcccccatattacactgatacaacattagcagtttcaacatttgcgaagttgtcttctcagacaccatcatctcccctcactatctactcaggcagtgaagcctctggacacacagagatcccccagcccagtgctctgccaggaatagacgtcggctcatctgtaatgtccccacaggattcttttaaggaaattcatgtaaatattgaagcaactttcaaaccatcaagtgaggaataccttcacataactgagcctccctctttatctcctgacacaaaattagaaccttcagaagatgatggtaaacctgagttattagaagaaatggaagcttctcccacagaacttattgctgtggaaggaactgagattctccaagatttccaaaacaaaaccgatggtcaagtttctggagaagcaatcaagatgtttcccaccattaaaacacctgaggctggaactgttattacaactgccgatgaaattgaattagaaggtgctacacagtggccacactctacttctgcttctgccacctatggggtcgaggcaggtgtggtgccttggctaagtccacagacttctgagaggcccacgctttcttcttctccagaaataaaccctgaaactcaagcagctttaatcagagggcaggattccacgatagcagcatcagaacagcaagtggcagcgagaattcttgattccaatgatcaggcaacagtaaaccctgtggaatttaatactgaggttgcaacaccaccattttcccttctggagacttctaatgaaacagatttcctgattggcattaatgaagagtcagtggaaggcacggcaatctatttaccaggacctgatcgctgcaaaatgaacccgtgccttaacggaggcacctgttatcctactgaaacttcctacgtatgcacctgtgtgccaggatacagcggagaccagtgtgaacttgattttgatgaatgtcactctaatccctgtcgtaatggagccacttgtgttgatggttttaacacattcaggtgcctctgccttccaagttatgttggtgcactttgtgagcaagataccgagacatgtgactatggctggcacaaattccaagggcagtgctacaaatactttgcccatcgacgcacatgggatgcagctgaacgggaatgccgtctgcagggtgcccatctcacaagcatcctgtctcacgaagaacaaatgtttgttaatcgtgtgggccatgattatcagtggataggcctcaatgacaagatgtttgagcatgacttccgttggactgatggcagcacactgcaatacgagaattggagacccaaccagccagacagcttcttttctgctggagaagactgtgttgtaatcatttggcatgagaatggccagtggaatgatgttccctgcaattaccatctcacctatacgtgcaagaaaggaacagttgcttgcggccagccccctgttgtagaaaatgccaagacctttggaaagatgaaacctcgttatgaaatcaactccctgattagataccactgcaaagatggtttcattcaacgtcaccttccaactatccggtgcttaggaaatggaagatgggctatacctaaaattacctgcatgaacccatctgcataccaaaggacttattctatgaaatactttaaaaattcctcatcagcaaaggacaattcaataaatacatccaaacatgatcatcgttggagccggaggtggcaggagtcgaggcgctgatccctaaaatggcgaacatgtgttttcatcatttcagccaaagtcctaacttcctgtgcctttcctatcacctcgagaagtaattatcagttggtttggatttttggaccaccgttcagtcattttgggttgccgtgctcccaaaacattttaaatgaaagtattggcattcaaaaagacagcagacaaaatgaaagaaaatgagagcagaaagtaagcatttccagcctatctaatttctttagttttctatttgcctccagtgcagtccatttcctaatgtataccagcctactgtactatttaaaatgctcaatttcagcaccgatggccatgtaaataagatgatttaatgttgattttaatcctgtatataaaataaaaagtcacaatgagtttgggcatatttaatgatgattatggagccttagaggtctttaatcattggttcggctgcttttatgtagtttaggctggaaatggtttcacttgctctttgactgtcagcaagactgaagatggcttttcctggacagctagaaaacacaaaatcttgtaggtcattgcacctatctcagccataggtgcagtttgcttctacatgatgctaaaggctgcgaatgggatcctgatggaactaaggactccaatgtcgaactcttctttgctgcattcctttttcttcacttacaagaaaggcctgaatggaggacttttctgtaaccagg

SEQ ID NO: 308 - DNA, 720 bp, Homo sapiens
gggggggggcggagggcgctcatttccgggccgcccaccacccgcgtagcaccggcagccgctgtcccggcagtctccagccgtcccgcccgcttgtggccaaactggctccagtcactcccgaaatgccagtcgacttcactgggtactggaagatgttggtcaacgagaatttcgaggagtacctgcgcgccctcgacgtcaatgtggccttgcgcaaaatcgccaacttgctgaagccagacaaagagatcgtgcaggacggtgaccatatgatcatccgcacgctgagcacttttaggaactacatcatggacttccaagttgggaaggagtttgaggaggatctgacaggcatagatgaccgcaagtgcatgacaacagtgagctgggacggagacaagctccagtgtgtgcagaagggtgagaaggaggggcgtggctggacccagtggatcgagggtgatgagctgcacctagagatgagagtggaaggtgtggtctgcaagcaagtattcaagaaggtgcagtgaggcccaagcagacaaccttgtcccaaccaatcagcaggatgtgtgagccaggatccctctttgcacagcatgaggcaaaaatgtccagccacccctaggcatctgttagcagagtctgtctcttggctttgtcacttttccttttcttaaaacaaagccatgccaataaagtgacctgtgttcaaaa

SEQ ID NO: 309 - DNA, 813 bp, Homo sapiens
acccgcgcctgaccgcggcagctcccaccatggcggagaccaagctccagctgtttgtcaaggcgagtgaggacggggagagcgtgggtcactgcccctcctgccagcggctcttcatggtcctgctcctcaagggcgtacctttcaccctcaccacggtggacacgcgcaggtccccggacgtgctgaaggacttcgcccccggctcgcagctgcccatcctgctctatgacagcgacgccaagacagacacgctgcagatcgaggactttctggaggagacgctggggccgcccgacttccccagcctggcgcctcgttacagggagtccaacaccgccggcaacgacgttttccacaagttctccgcgttcatcaagaacccggtgcccgcgcaggacgaagccctgtaccagcagctgctgcgcgccctcgccaggctggacagctacctgcgcgcgcccctggagcacgagctggcgggggagccgcagctgcgcgagtcccgccgccgcttcctggacggcgacaggctcacgctggccgactgcagcctcctgcccaagctgcacatcgtcgacacggtgtgcgcgcacttccgccaggcgcccatccccgcggagctgcgcggcgtacgccgctacctggacagcgcgatgcaggagaaagagttcaaatacacgtgtccgcacagcgccgagatcctggcggcctaccggcccgccgtgcacccccgctagcgccccaccccgcgtctgtcgcccaataaaggcatctttgtcgggagtgagggtgtcctgacatctgaagggc

SEQ ID NO: 310 - DNA, 3432 bp, Homo sapiens
gcgagagcggagctccaagcccggcagcccgagaggaagatgaacagccccaggccagagcctctggcagagtggaccccgagccgcccccaggtagccaggagcggcctcagcggcagccgcaaactccagtagccgcccgtgctgcccgtggctggggcggagggcagccagagctggggaccaaggctccgcgccacctgcgcgcacagcctcacacctgaacgctgtcctcccgcagacgagaccggcgggcactgcaaagctgggactcgtctttgaaggaaaaaaaatagcgagtaagaaatccagcaccattcttcactgacccatcccgctgcacctcttgtttcccaagtttttgaaagctggcaactctgacctcggtgtccaaaaatcgacagccactgagaccggctttgagaagccgaagatttggcagtttccagactgagcaggacaaggtgaaagcaggttggaggcgggtccaggacatctgagggctgaccctgggggctcgtgaggctgccaccgctgctgccgctacagacccagccttgcactccaaggctgcgcaccgccagccactatcatgtccactcccggggtcaattcgtccgcctccttgagccccgaccggctgaacagcccagtgaccatcccggcggtgatgttcatcttcggggtggtgggcaacctggtggccatcgtggtgctgtgcaagtcgcgcaaggagcagaaggagacgaccttctacacgctggtatgtgggctggctgtcaccgacctgttgggcactttgttggtgagcccggtgaccatcgccacgtacatgaagggccaatggcccgggggccagccgctgtgcgagtacagcaccttcattctgctcttcttcagcctgtccggcctcagcatcatctgcgccatgagtgtcgagcgctacctggccatcaaccatgcctatttctacagccactacgtggacaagcgattggcgggcctcacgctctttgcagtctatgcgtccaacgtgctcttttgcgcgctgcccaacatgggtctcggtagctcgcggctgcagtacccagacacctggtgcttcatcgactggaccaccaacgtgacggcgcacgccgcctactcctacatgtacgcgggcttcagctccttcctcattctcgccaccgtcctctgcaacgtgcttgtgtgcggcgcgctgctccgcatgcaccgccagttcatgcgccgcacctcgctgggcaccgagcagcaccacgcggccgcggccgcctcggttgcctcccggggccaccccgctgcctccccagccttgccgcgcctcagcgactttcggcgccgccggagcttccgccgcatcgcgggcgccgagatccagatggtcatcttactcattgccacctccctggtggtgctcatctgctccatcccgctcgtggtgcgagtattcgtcaaccagttatatcagccaagtttggagcgagaagtcagtaaaaatccagatttgcaggccatccgaattgcttctgtgaaccccatcctagacccctggatatatatcctcctgagaaagacagtgctcagtaaagcaatagagaagatcaaatgcctcttctgccgcattggcgggtcccgcagggagcgctccggacagcactgctcagacagtcaaaggacatcttctgccatgtcaggccactctcgctccttcatctcccgggagctgaaggagatcagcagtacatctcagaccctcctgccagacctctcactgccagacctcagtgaaaatggccttggaggcaggaatttgcttccaggtgtgcctggcatgggcctggcccaggaagacaccacctcactgaggactttgcgaatatcagagacctcagactcttcacagggtcaggactcagagagtgtcttactggtggatgaggctggtgggagcggcagggctgggcctgcccctaaggggagctccctgcaagtcacatttcccagtgaaacactgaacttatcagaaaaatgtatataataggcaaggaaagaaatacagtactgtttctggacccttataaaatcctgtgcaatagacacatacatgtcacatttagctgtgctcagaagggctatcatcatcctacaactcacattagagaacatcctggcttttgagcacttttcaaacaatcaagttgactcacgtgggtcctgaggcctgcagcacgtcggatgctaccccactatgacagaggattgtggtcacaacttgatggctgcgaagacctaccctccgtttttctactagataggaggatggtagaagtttggctgctgtcataacatccagagctttgtcgtatttggcacacagcagaggcccagatattagaaaggctctattccaataaactatgaggactgccttatggatgatttaagtgtctcactaaagcatgaaatgtgaatttttattgttgtacatacgatttaaggtatttaaagtattttcttctctgtgagaaggtttattgttaatacaaggtataataaaattatcgcaacccctctccttccagtataaccagctgaagttgcagatgttagatatttttcataaacaagttcgagtcaaagttgaaaattcatagtaagattgatatctataaaatagatataaatttttaagagaaagaatttagtattatcaaagggataaagaaaaaaatactatttaagatgtgaaaattacagtccaaaatactgttctttccaggctatgtataaaatacatagtgaaaattgtttagtgatattacatttatttatccagaaaactgtgatttcaggagaacctaacatgctggtgaatattttcaactttttccctcactaattggtacttttaaaaacataacataaattttttgaagtctttaataaataacccataattgaagtgtataatataaaaaattttaaaaatctaagcagcttattgtttctctgaaagtgtgtgtagttttactttcctaaggaattaccaagaatatcctttaaaatttaaaaggatggcaagttgcatcagaaagctttattttgagatgtaaaaagattcccaaacgtggttacattagccattcatgtatgtcagaagtgcagaattggggcacttaatggtcaccttgtaacagttttgtgtaactcccagtgatgctgtacacatatttgaagggtctttctcaaagaaatattaagcatgttttgttgctcagtgtttttgtgaattgcttggttgtaattaaattctgagcctgatattgatatggttttaagaagcagttgtaccaagtgaaattattttggagattataataaatatatacattcaaaaaaaaaaaaaaaaaa

SEQ ID NO: 311 - DNA, 2455 bp, Homo sapiens
gagagaactagtcttctgtgtaaactgaggctaaacaaacacagatggagcgcagcgggcgttctccagaaatgctggcaaggaggcagcgacttcagatgacactctgagcgctccgggaacggacagcccggcggcttcccgaagccggcggcgcagctgcccggggcgagggggagaaagggagagagggagggggagggcgggcgaagcgggagagccagagactcctcggcgctgagcgcggcggcggcccgggcagccccacgcccctgcctcgcgcgccgcccgcgccatgaagcacatcccggtcctcgaggacgggccgtggaagaccgtgtgcgtgaaggagctgaacggccttaagaagctcaagcggaaaggcaaggagccggcgcggcgcgcgaacggctataaaactttccgactggacttggaagcgcccgagccccgcgccgtagccaccaacgggctgcgggacaggacccatcggctgcagccggtcccggtaccggtgccggtgccagtcccagtggcgccggccgttcccccaagagggggcacggacacagccggggagcgcgggggctctcgggcgcccgaggtctccgacgcgcggaaacgctgcttcgccctaggcgcagtggggccaggactccccacgccgccgccgccgccgcctcctgcgccccagagccaggcacctgggggcccagaggcacagcctttccgggagccgggtccgcgtcctcgcatcttgctgtgcgcaccgcccgcgcgccccgcgccgtcagcacccccagcaccgccagcgcccccggagtccactgtgcgccctgcgcccccgacgcgccccggggaaagttcctactcgtcaatttcacacgtaatttacaataaccaccaggattcctccgcgtcgcctaggaaacgaccgggcgaagcgactgccgcctcctccgagatcaaagccctgcagcagacccggaggctcctggcgaacgccagggagcggacgcgggtgcacaccatcagcgcagccttcgaggcgctcaggaagcaggtgccgtgctactcatatgggcagaagctgtccaaactggccatcctgaggatcgcctgtaactacatcctgtccctggcgcggctggctgaccttgactacagtgccgaccacagcaacctcagcttctccgagtgtgtgcagcgctgcacccgcaccctgcaggccgagggacgtgccaagaagcgcaaggagtgactggctgcaggcaagaccaaggccaccactgtgggccctccttccagtcaggcctgaggacaaggtgagctcgctgagtccagcctcgtggtcttctccaagatgccgccagatgcccagcctacagcctctcagggtcggatcggagcacgcctgcctccctctcccctccgccctcacccagccaatccgaggctgcttcgcactttgccctctgcctggtggggaggggagagctcagcccccgactcactcagaccccaaggcccactgtccagctgcagaaattcgttgccaaagattggacagagacaccgaaggaaatggggtggtgaaaccccacagcgaaaagccacaccgttgctctgtgacttttgctcctcctgttgcctgagccccatctcaagccaaagatgagtcagtggttctgctaggaactcatggaatggatgggcatttgatgacccctgggggtcatcttggccctctgacctggtgctctctctccactgggccttgtgctggctgagtgcaagacaagccttaggggctgtgagagggaggctggggtgcctgggcggggctgggagtgggacctgagatccctgcccactctctccccttcattggctgcccaggccactggccccagttctcagtgtcccttgggtccaggctccttgggccctaagcatcaccagaagggagtaagcagggagagaagcaatattactccctcccctacaccagggacttgccccagggcagctacctatgggtctttgcttccccagccagcctctcctcactgtgacccacccccatgggcccccgtcccaggcagccagcaccatgggcaggccctgccatggacagaaaaagagtttttctcttgttcagcctgcacgtggcctgaggaaggagtagaggctgggttggctggagccgtcctactgggcaagatggcgccccacttggagggcggtggtctgttacagggtgtgcaggggcagagaaggaagggaccaggggactgggccagtatgtggaggatggggcctgcgtgttcaaagccaaggcccgccccttccttgtgctcaaatggccaaagctgttcacgtctgtgctcaaccatctgcttcaaattgaagtaaaagccccaaaatgtcaagaaaaaaaaaaaaaaaaaaaaaa

SEQ ID NO: 312 - DNA, 5337 bp, Homo sapiens
gccccccctccccgcggcgccgcatcttgaatggaaacatggcggtgccggctcggacctgcggcgcctctcggcccggcccagcgcggactgcgcgcccctggcccggctgcggcccccaccctggccccggcacccggcgcccgacgtccgggcccccgcgcccgctgtggctgctgctgccgcttctaccgctgctcgccgcccccggcgcctctgcctacagcttcccccagcagcacacgatgcagcactgggcccggcgtctggagcaggaggtcgacggcgtgatgcggatttttggaggcgtccagcagctccgtgagatttacaaggacaaccggaacctgttcgaggtacaggagaatgagcctcagaagttggtggagaaggtggcaggggacattgagagccttctggacaggaaggtgcaggccctgaagagactggctgatgctgcagagaacttccagaaagcacaccgctggcaggacaacatcaaggaggaagacatcgtgtactatgacgccaaggctgacgctgagctggacgaccctgagagtgaggatgtggaaagggggtctaaggccagcaccctaaggctggacttcatcgaggacccaaacttcaagaacaaggtcaactattcatacgcggctgtacagatccctacggacatctacaaaggctccactgtcatcctcaatgagctcaactggacagaggccctggagaatgtgttcatggaaaaccgcagacaagaccccacactgctgtggcaggtcttcggcagcgccacaggagtcactcgctactacccggccaccccgtggcgagcccccaagaagatcgacctgtacgatgtccgaaggagaccctggtatatccagggggcctcgtcacccaaagacatggtcatcatcgtggatgtgagtggcagtgtgagcggcctgaccctgaagctgatgaagacatctgtctgcgagatgctggacacgctgtctgatgatgactatgtgaatgtggcctcgttcaacgagaaggcacagcctgtgtcatgcttcacacacctggtgcaggccaatgtgcgcaacaagaaggtgttcaaggaagctgtgcagggcatggtggccaagggcaccacaggctacaaggccggctttgagtatgcctttgaccagctgcagaactccaacatcactcgggccaactgcaacaagatgatcatgatgttcacggatggtggtgaggaccgcgtgcaggacgtctttgagaagtacaattggccaaaccggacggtgcgcgtgtttactttctccgtggggcagcataactatgacgtcacaccgctgcagtggatggcctgtgccaacaaaggctactattttgagatcccttccatcggagccatccgcatcaacacacaggaatatctagatgtgttgggcaggcccatggtgctggcaggcaaggaggccaagcaggtgcagtggaccaacgtgtatgaggatgcactgggactggggttggtggtaacagggaccctccctgttttcaacctgacacaggatggccctggggaaaagaagaaccagctgatcctgggcgtgatgggcattgacgtggctctgaatgacatcaagaggctgacccccaactacacgcttggagccaacggctatgtgtttgccattgacctgaacggctacgtgttgctgcaccccaatctcaagccccagaccaccaacttccgggagcctgtgactctggacttcctggatgcggagctagaggatgagaacaaggaagagatccgtcggagcatgattgatggcaacaagggccacaagcagatcagaacgttggtcaagtccctggatgagaggtacatagatgaggtgacacggaactacacctgggtgcctataaggagcactaactacagcctggggctggtgctcccaccctacagcaccttctacctccaagccaatctcagtgaccagatcctgcaggtcaagtattttgagttcctgctccccagcagctttgagtctgaaggacacgttttcattgctcccagagagtactgcaaggacctgaatgcctcagacaacaacaccgagttcctgaaaaactttattgagctcatggagaaagtgactccagactccaagcagtgcaacaacttccttctgcacaacctgatcttggacacgggcatcacgcagcagctggtagagcgtgtgtggagggaccaggatctcaacacgtacagcctactggccgtgttcgctgccacagacggtggcatcacccgagtcttccccaacaaggcagctgaggactggacagagaaccctgagcccttcaatgccagcttctaccgccgcagcctggataaccacggttatgtcttcaagcccccacaccaggatgccctgttaaggccgctggagctggagaatgacactgtgggcatcctcgtcagcacagctgtggagctcagcctaggcaggcgcacactgaggccagcagtggtgggcgtcaagctggacctagaggcttgggctgagaagttcaaggtgctagccagcaaccgtacccaccaagaccagcctcagaagtgcggccccaacagccactgtgagatggactgcgaggttaacaatgaggacttactctgtgtcctcattgatgatggaggattcctggtgctgtcaaaccagaaccatcagtgggaccaggtgggcaggttcttcagtgaggtggatgccaacctgatgctggcactctacaataactccttctacacccgcaaggagtcctatgactatcaggcagcctgtgcccctcagccccctggcaacctgggtgctgcaccccggggtgtctttgtgcccaccgttgcagatttccttaacctggcctggtggacctctgctgccgcctggtccctgttccagcagcttctctacggcctcatctaccacagctggttccaagcagaccccgcggaggccgaggggagccccgagacgcgcgagagcagctgcgtcatgaaacagacccagtactacttcggctcggtaaacgcctcctacaacgccatcatcgactgcggaaactgctccaggctgttccacgcgcagagactgaccaacaccaatcttctctttgtggtggccgagaagccgctgtgcagccagtgcgaggctggccggctgctgcagaaggagacgcactcggacggcccggagcagtgtgagctagtgcagagaccgcgataccggagaggcccgcacatctgcttcgactacaacgcgacagaagatacctcagactgtggccgcggggcctccttcccgccgtcgctgggcgtcctggtctccctgcaactgctgctcctcctgggcctgccgccccggccgcagcctcaagtcctcgtccacgcctctcgccgcctctgagcaccctgccccaccccacctccactcccacctcacccggcctcttcgcctttcccaccctcctgccccacactccccgccttagagcctcgtccctccctcactgaaggacctgagctggccaggccctgagagtctggtctgcgccttgggatggggagtcccaaagcgggacgccgcaggtgtttggcacccaaatcacatctcacctccgaactgttcaagtgtccccagacccttcttgcctgctgggctccccccagtgggatgggacagggaggccacacgcactggtgccaaaaccaggcctctgctgccgcccttcctggaggctgcctatgttgggggggaccctgcctcagctgacccggcctctctgccccacccaagcccaaacttggtttctgtgagaatagtggaggaaggtgagatggccagtttgaagcctgtgcctcccagcttaaatcctagcaggagagaggctctggggcagcccccatgggctcctgcccctttcaggcctacagccacatccccaagcccaccaggtgtcaggatagtcacagtgataccagttcagacactaccccatatacacctggaacattgaggatggaaactggactcacattcgacataccccactgggcacacgcacaaacacacacactatggggtggggtgggtgtaggggcttacaaagccttacacagggcgaggggttggtgggagggttggcacctgcacactccatctcctgctcaccacctgcctctaatctgagctgcagcctggctggtcctcccatttctaaagctgaatgtcaaacagtgccaaatgctggggcagggggtgaagaaccctctgtcccacccctagccaccagtgtcctccaagtgccccctcacctctccaggtgctcattgtaaccatttctcactagtgtcaggcccccagtgggaccacatgccactgcctgcacctttcggcagaggaacccccaccagacatcaccctttgccttagcaggggtgactttgtctctcctggctgggccatccttccgccaatctggcccttacacactcaggcctgtgcccactccctatctccttcccacccctacacacacactccctgcttgcaggaggccaaactgtccctcccttgctgaacacacacacacacacacacacacaggtggggactgggcacagctcttcacaccattcattctggtcatttcccccaaaggcatcccagcctgggggccagtggggaactgagggcaaggggatatagtgatggggctcagatggactgggaggagggggagggtgatgcattaattaatggcttcgttaattaatgtcatgttgcttgtcgctttctcagtgtgtgtgtgtggtccatgcccactgctggtgccagggtgggtgtccatgtgcacccggcctggatgccagctgtgtccttcgggggcgtgcgtgtaactgtagtgtagtcaggtgctcaatggagaatataaacatatacagaaaaatatatattttaagtttaaaaaacagaaaaacagacaaaacaatccccatcaggtagctgtctaacccccagctgggtctaatccttctcattacccacccgacctggctgcccctcaccttgggctgggggactggggggccatttccttttctctgccctttttttgttgttctattttgtacagacaagttggaaaaacaacagcgacaaaaaagtcaagaaactttgtaaaatatcgtgtgtgtgattccttgtaaaatattttcaaatggtttattacagaagatcagttattaaataatgttcatattttcacttcaaa

SEQ ID NO: 313 - DNA, 4814 bp, Homo sapiens
gaattctagaggcggcggagggtggcgaggagctctcgctttctctcgctccctccctctccgactccgtctctctctctctctctctctctcccctccctctctttccctctgttccattttttccccctctaaatcctccctgccctgcgcgcctggacacagatttaggaagcgaattcgctcacgttttaggacaaggaagagagagaggcacgggagaagagcccagcaagatttggattgaaaccgagacaccctccggaggctcggagcagaggaaggaggaggagggcggcgaacggaagccagtttgcaattcaagttttgatagcgctggtagaagggggtttaaatcagatttttttttttttaaaggagagagactttttccgctctctcgctccctgttaaagccgggtctagcacagctgcagacgccaccagcgagaaagagggagaggaagacagatagggggcgggggaagaagaaaaagaaaggtaaaaagtcttctaggagaacctttcacatttgcaacaaaagacctaggggctggagagagattcctgggacgcagggctggagtgtctatttcgagctcagcggcagggctcgggcgcgagtcgagaccctgctcgctcctctcgcttctgaaaccgacgttcaggagcggctttttaaaaacgcaaggcacaaggacggtcacccgcgcgactatgtttgctgatttttcgccttgccctctttaaaagcggcctcccattctccaaaagacacttcccctcctccctttgaagtgcattagttgtgatttctgcctccttttcttttttctttcttttttgttttgctttttccccccttttgaattatgtgctgctgttaaacaacaacaaaaaaacaacaaaacacagcagctgcggacttgtccccggctggagcccagcgccccgcctggagtggatgagcctctccatgagagatccggtcattcctgggacaagcatggcctaccatccgttcctacctcaccgggcgccggacttcgccatgagcgcggtgctgggtcaccagccgccgttcttccccgcgctgacgctgcctcccaacggcgcggcggcgctctcgctgccgggcgccctggccaagccgatcatggatcaattggtgggggcggccgagaccggcatcccgttctcctccctggggccccaggcgcatctgaggcctttgaagaccatggagcccgaagaagaggtggaggacgaccccaaggtgcacctggaggctaaagaactttgggatcagtttcacaagcggggcaccgagatggtcattaccaagtcgggaaggcgaatgtttcctccatttaaagtgagatgttctgggctggataaaaaagccaaatacattttattgatggacattatagctgctgatgactgtcgttataaatttcacaattctcggtggatggtggctggtaaggccgaccccgaaatgccaaagaggatgtacattcacccggacagccccgctactggggaacagtggatgtccaaagtcgtcactttccacaaactgaaactcaccaacaacatttcagacaaacatggatttactttggccttcccaagtgatcacgctacgtggcaggggaattatagttttggtactcagactatattgaactccatgcacaaataccagccccggttccacattgtaagagccaatgacatcttgaaactcccttatagtacatttcggacatacttgttccccgaaactgaattcatcgctgtgactgcataccagaatgataagataacccagttaaaaatagacaacaacccttttgcaaaaggtttccgggacactggaaatggccgaagagaaaaaagaaaacagctcaccctgcagtccatgagggtgtttgatgaaagacacaaaaaggagaatgggacctctgatgagtcctccagtgaacaagcagctttcaactgcttcgcccaggcttcttctccagccgcctccactgtagggacatcgaacctcaaagatttatgtcccagcgagggtgagagcgacgccgaggccgagagcaaagaggagcatggccccgaggcctgcgacgcggccaagatctccaccaccacgtcggaggagccctgccgtgacaagggcagccccgcggtcaaggctcaccttttcgctgctgagcggccccgggacagcgggcggctggacaaagcgtcgcccgactcacgccatagccccgccaccatctcgtccagcactcgcggcctgggcgcggaggagcgcaggagcccggttcgcgagggcacagcgccggccaaggtggaagaggcgcgcgcgctcccgggcaaggaggccttcgcgccgctcacggtgcagacggacgcggccgccgcgcacctggcccagggccccctgcctggcctcggcttcgccccgggcctggcgggccaacagttcttcaacgggcacccgctcttcctgcaccccagccagtttgccatggggggcgccttctccagcatggcggccgctggcatgggtcccctcctggccacggtttctggggcctccaccggtgtctcgggcctggattccacggccatggcctctgccgctgcggcgcagggactgtccggggcgtccgcggccaccctgcccttccacctccagcagcacgtcctggcctctcagggcctggccatgtcccctttcggaagcctgttcccttacccctacacgtacatggccgcagcggcggccgcctcctctgcggcagcctccagctcggtgcaccgccaccccttcctcaatctgaacaccatgcgcccgcggctgcgctacagcccctactccatcccggtgccggtcccggacggcagcagtctgctcaccaccgccctgccctccatggcggcggccgcggggcccctggacggcaaagtcgccgccctggccgccagcccggcctcggtggcagtggactcgggctctgaactcaacagccgctcctccacgctctcctccagctccatgtccttgtcgcccaaactctgcgcggagaaagaggcggccaccagcgaactgcagagcatccagcggttggttagcggcttggaagccaagccggacaggtcccgcagcgcgtccccgtagacccgtcccagacacgtcttttcattccagtccagttcaggctgccgtgcactttgtcggatataaaataaaccacgggcccgccatggcgttagcccttccttttgcagttgcgtctgggaaggggccccggactccctcgagagaatgtgctagagacagcccctgtcttcttggcgtggtttatatgtccgggatctggatcagattctgggggctcagaaacgtcggttgcattgagctactgggggtaggagttccaacatttatgtccagagcaacttccagcaaggctggtctgggtctctgcccaccaggcggggaggtgttcaaagacatctccctcagtgcggatttatatatatatttttccttcactgtgtcaagtggaaacaaaaacaaaatctttcaaaaaaaaaatcgggacaagtgaacacattaacatgattctgtttgtgcagattaaaaactttatagggacttgcattatcggttctcaataaattactgagcagctttgtttggggagggaagtccctaccatccttgtttagtctatattaagaaaatctgtgtctttttaatattcttgtgatgttttcagagccgctgtaggtctcttcttgcatgtccacagtaatgtatttgtggtttttattttgaacgcttgcttttagagagaaaacaatatagccccctacccttttcccaatcctttgccctcaaatcagtgacccaagggagggggggatttaaagggaaggagtgggcaaaacacataaaatgaatttattatatctaagctctgtagcaggattcatgtcgttctttgacagttctttctctttcctgtatatgcaataacaaggttttaaaaaaataataaagaagtgagactattagacaaagtatttatgtaattatttgataactcttgtaaataggtggaatatgaatgcttggaaaattaaactttaatttattgacattgtacatagctctgtgtaaatagaattgcaactgtcaggttttgtgttcttgttttcctttagttgggtttatttccaggtcacagaattgctgttaacactagaaaacacacttcctgcaccaacaccaataccctttcaaaagagttgtctgcaacatttttgttttcttttttaatgtccaaaagtgggggaaagtgctatttcctattttcaccaaaattggggaaggagtgccactttccagctccacttcaaattccttaaaatataactgagattgctgtggggagggaggagggcagaggctgcggtttgactttttaatttttcttttgttatttgtatttgctagtctctgatttcctcaaaacgaagtggaatttactactgttgtcagtatcggtgttttgaattggtgcctgcctatagagatatattcacagttcaaaagtcaggtgctgagagatggtttaaagacaaattcatgaaggtatattttgtgttatagttgttgatgagttctttggttttctgtatttttccccctctctttaaaacatcactgaaatttcaataaatttttattgaaatgtctaaaaaaaaaaaaaaaaaaaaaaaaaaaaaaa

SEQ ID NO: 314 - DNA, 2389 bp, Homo sapiens
aggcgcggttgtgagtagtaccgggagtggggtgatcccgggctaggggagcgcggcggccgcgatcgggcttagtcggagctccgaagggagtgactaggacacccgggtgggctacttttcttccggtgcttttgctttttttttcctttgggctcgggctgagtgtcgcccactgagcaaagattccctcgtaaaacccagagcgaccctcccgtcaattgttgggctcgggagtgtcgcggtgccccgagcgcgccgggcgcggaggcaaagggagcggagccggccgcggacggggcccggagcttgcctgcctccctcgctcgccccagcgggttcgctcgcgtagagcgcagggcgcgcgcgatgaaggcggtgagcccggtgcgcccctcgggccgcaaggcgccgtcgggctgcggcggcggggagctggcgctgcgctgcctggccgagcacggccacagcctgggtggctccgcagccgcggcggcggcggcggcggcagcgcgctgtaaggcggccgaggcggcggccgacgagccggcgctgtgcctgcagtgcgatatgaacgactgctatagccgcctgcggaggctggtgcccaccatcccgcccaacaagaaagtcagcaaagtggagatcctgcagcacgttatcgactacatcctggacctgcagctggcgctggagacgcacccggccctgctgaggcagccaccaccgcccgcgccgccacaccacccggccgggacctgtccagccgcgccgccgcggaccccgctcactgcgctcaacaccgacccggccggcgcggtgaacaagcagggcgacagcattctgtgccgctgagccgcgctgtccaggtgtgcggccgcctgagcccgagccaggagcactagagagggagggggaagagcagaagttagagaaaaaaagccaccggaggaaaggaaaaaacatcggccaacctagaaacgttttcattcgtcattccaagagagagagaggaaagaaaaatacaactttcattctttctttgcacgttcataaacattctacatacgtattctcttttgtctcttcatttataactgctgtgaattgtacatttctgtgttttttggaggtgcagttaaacttttaagcttaagtgtgacaggactgataaatagaagatcaagagtagatccgactttagaagcctactttgtgaccaaggagctcaatttttgttttgaagctttactaatctaccagagcattgtagatattttttttttacatctattgtttaaaatagatgattataacggggcagagaactttcttttctctgcaagaatgttacatattgtatagataaatgagtgacatttcataccatgtatatatagagatgttctataagtgtgagaaagtatatgctttaatagatactgtaattataagatatttttaattaaatatttttttgtaaatattatgtgtgtgtttttttttaatctatgggaatatttcttttggaaaatcatttttcagctcaattacagagctcttgatatcttgaatgtcttttctgtttggcctggctcttaatttgcttttgttttgcccagtatagactcggaagtaacagttatagctagtggtcttgcatgattgcatgagatgtttaatcacaaattaaacttgttctgagtccattcaaatgtgtttttttaaatgtagattgaaatctttgtatttgaagcatacatgttgaaaatacaccttatcagtttttaagtacagggttttatagtgtaatatatacagagtaagtgtttgtttttgtttttcaactgaggtcaaaatggattctgaatgattttgcatatgggatgaggaaatgcttggatccttaaggagtttacgaaatctgctgttttatcaaagtgaaaaaaaattgcttattactcttcattttacactaaagcttaatgtcactaagtttcatgtctgtacagattatttaaatcatggaaatgaaaaaaatgttctctgcttgctaccaaaggacaaactcttggaaatgaacactttctgctttccttcctccaaagaattaataggcaacagtgggagaaaaaaaaggcataatggcaaatccttcaagcagggataaaagtcgatcttcaaacattaacttaagcagaccaaaaattctgatgaccgcatctagattatttttttataaaaatgattttcactatagctatgttacgctaagctactgtcccatctcttgtgatgtgtaacttttacatgtgaatattaaagtagatttctctgtcttgtaaaaaaaaaaaaaaaaaaaaaaaaaaaaaaaaaaaaaaaaaaaaaa

SEQ ID NO: 315 - DNA, 1998 bp, Homo sapiens
gcgcgcgcgttttccttgttcctggtcaacaaagaaatgtggagtgtcttggctgaatcctcatacagacaagatcattatggtgctgttaggtaggacttgtatccagatgtaaggttgaaaaagtgatataataaaggaaccaaggagaaaattcagaaggaaagaaaaaattgcctctgcaggtgtgcgagcaggattgcttctgcaacaaaagcctccacccagccacatcttgggaaaagaatggccacttcttggggcacagtctttttcatgctggtggtatcctgtgtttgcagcgctgtctcccacaggaaccagcagacttggtttgagggtatcttcctgtcttccatgtgccccatcaatgtcagcgccagcaccttgtatggaattatgtttgatgcagggagcactggaactcgaattcatgtttacacctttgtgcagaaaatgccaggacagcttccaattctagaaggggaagtttttgattctgtgaagccaggactttctgcttttgtagatcaacctaagcagggtgctgagaccgttcaagggctcttagaggtggccaaagactcaatcccccgaagtcactggaaaaagaccccagtggtcctaaaggcaacagcaggactacgcttactgccagaacacaaagccaaggctctgctctttgaggtaaaggagatcttcaggaagtcacctttcctggtaccaaagggcagtgttagcatcatggatggatccgacgaaggcatattagcttgggttactgtgaattttctgacaggtcagctgcatggccacagacaggagactgtggggaccttggacctagggggagcctccacccaaatcacgttcctgccccagtttgagaaaactctggaacaaactcctaggggctacctcacttcctttgagatgtttaacagcacttataagctctatacacatagttacttgggatttggattgaaagctgcaagactagcaaccctgggagccctggagacagaagggactgatgggcacactttccggagtgcctgtttaccgagatggttggaagcagagtggatctttgggggtgtgaaataccagtatggtggcaaccaagaaggggaggtgggctttgagccctgctatgccgaagtgctgagggtggtacgaggaaaacttcaccagccagaggaggtccagagaggttccttctatgctttctcttactattatgaccgagctgttgacacagacatgattgattatgaaaaggggggtattttaaaagttgaagattttgaaagaaaagccagggaagtgtgtgataacttggaaaacttcacctcaggcagtcctttcctgtgcatggatctcagctacatcacagccctgttaaaggatggctttggctttgcagacagcacagtcttacagctcacaaagaaagtgaacaacatagagacgggctgggccttgggggccacctttcacctgttgcagtctctgggcatctcccattgaggccacgtacttccttggagacctgcatttgccaacacctttttaaggggaggagagagcacttagtttctgaactagtctgggacatcctggacttgagcctagagatttaggtttaattaattttacacatctaatgtgaactgctgcctaaccactcaagagtacacagctggcaccagagcatcacagagagccctgtgagccaaaaagtatagttttggaacttaaccttggagtgagagcccagggacaggtccctggaaaccaaagaaaaatcgcatttcaaccctttgagtgcctcattccactgaatatttaaattttcctcttaaatggtaaactgacttattgcaatcccaagacccatcaatatcagtatttttttcctccctatacagtgccctgcccacccttatctgcacccacctcccctgaaaaagagagaaaaaaaaaaaaaaaaaa

SEQ ID NO: 316 - DNA, 3047 bp, Homo sapiens
cccttgcgcctccttgcccggccgcgcccagcccggcgtcccgagcagcgcaggggaggatccccgcgcagtgacccgggagccaccacagactctgggaggctcggcggctggagcagcaggcagctccccgcagctcccggcgcttccaggcagctctctgagccgtgccagaggcccggcccgccattcccagccccgagccatgatgaagactttgtccagcgggaactgcacgctcagtgtgcccgccaaaaactcataccgcatggtggtgctgggtgcctctcgggtgggcaagagctccatcgtgtctcgcttcctcaatggccgctttgaggaccagtacacacccaccatcgaggacttccaccgtaaggtatacaacatccgcggcgacatgtaccagctcgacatcctggatacctctggcaaccaccccttccccgccatgcgcaggctgtccatcctcacaggggatgtcttcatcctggtgttcagcctggataaccgggagtccttcgatgaggtcaagcgccttcagaagcagatcctggaggtcaagtcctgcctgaagaacaagaccaaggaggcggcggagctgcccatggtcatctgtggcaacaagaacgaccacggcgagctgtgccgccaggtgcccaccaccgaggccgagctgctggtgtcgggcgacgagaactgcgcctacttcgaggtgtcggccaagaagaacaccaacgtggacgagatgttctacgtgctcttcagcatggccaagctgccacacgagatgagccccgccctgcatcgcaagatctccgtgcagtacggtgacgccttccaccccaggcccttctgcatgcgccgcgtcaaggagatggacgcctatggcatggtctcgcccttcgcccgccgccccagcgtcaacagtgacctcaagtacatcaaggccaaggtccttcgggaaggccaggcccgtgagagggacaagtgcaccatccagtgagcgagggatgctggggcggggcttggccagtgccttcagggaggtggccccagatgcccactgtgcgcatctccccaccgaggccccggcagcagtcttgttcacagaccttaggcaccagactggaggcccccgggcgctggcctccgcacattcgtctgccttctcacagctttcctgagtccgcttgtccacagctccttggtggtttcatctcctctgtgggaggacacatctctgcagcctcaagagttaggcagagactcaagttacaccttcctctcctggggttggaagaaatgttgatgccagaggggtgaggattgctgcgtcatatggagcctcctgggacaagcctcaggatgaaaaggacacagaaggccagatgagaaaggtctcctctctcctggcataacacccagcttggtttgggtggcagctgggagaacttctctcccagccctgcaactcttacgctctggttcagctgcctctgcaccccctcccacccccagcacacacacaagttggcccccagctgcgcctgacattgagccagtggactctgtgtctgaagggggcgtggccacacctcctagaccacgcccaccacttagaccacgcccacctcctgaccgcgttcctcagcctcctctcctaggtccctccgcccgacagttgtgctttgttgtggttgcagctgttttcgtgtcatgtatagtagtagaaatggaaatcattgtactgtaaaagcctagtgactccctccttggccaggccctcacccagttcagatccacggcctccacccgggacgccttcctcctctgctcccaaacagggtttccgtggcctgtttgcagctagacattgacctccgccattgagctccacggtttacagacaattgcacaagcgtggggtgggcaggccaggactgcttttttttaatgctcccatttcacagaggataccaccgagactcggaggggacacgatgagcaccaggccccacctttgtcccctagcaaattcagggtacagctccacctagaaccaggctgccctctactgtgctcgttcctcaagcatttattaagcacctactgggtgctgggttcactgtgtcctaggaaaccaagagggtccccagtcctggcctctgcccgcccctgctgccccaccaccttctgcacacacagcggtggggaggcggggaggagcagctgggacccagaactgagcctgggagggatccgacagaaaagctcagggcgggtcttctccttgtgcccgggattgggctatgctgggtaccaccatgtactcaggcatggtgggttttgaacccataaaccaaaggcccttgtcatcagctcttaacaagtatattttgtattttaatctctctaaacatattgaagttttagggccctaaggaaccttagtgatcttctattgggtctttctgaggttcagagagggtaagtaacttcctccaggtcacacagcaagtctgtgggtggcagaagcaagctagcgctgggcattcagtacataccacgatgtgctccctctcttgatgcttggcccctggggccttcagggctttgggacatcttgtcctcaaccctctccctagatcagtctgtgagggtccctgtagatattgtgtacaccatgcccatgtatatacaagtacacacagatgtacacacagatgtacacatgctccagccccagctctgcatacctgcacctgcaccccagccttggcccctgcctgcgtctgtgctcaaagcagcagctccaaccctgcctctgtccccttccccacccactgcctgagccttctgagcagaccaggtaccttggctgcaccggtgtgtggcccgctctcacccaggcacagccccgccaccatggatctccgtgtacactatcaataaaagtgggtttgttacaaaaaaaaaaaaaaaaaaaaaaaaaaaaaaaaaaaaaaaaaaaaaaaaaaaaaaaaaaaaaaaaaaaaaaaaaaaaa

SEQ ID NO: 317 - DNA, 4529 bp, Homo sapiens
gtctgcccgccgccgccactgctgctgccaccgccgtcgccgccgccgccgccgccgccgctgctgctgccggtgctaaggagttcgctggagccctttcctcagacccggcccggtcttcgcgcccggactcctggcgccagcgctaggcgcactcaccgctctgacgggtgcagacgcgggagttgtcccagactgtggagtggcgggcacggccccagccccccttcccttccctgaccccttcttgccatcgccccagacatggggaacgcggcgaccgccaagaaaggcagcgaggtggagagcgtgaaagagtttctagccaaagccaaagaagactttttgaaaaaatgggagaatccaactcagaataatgccggacttgaagattttgaaaggaaaaaaacccttggaacaggttcatttggaagagtcatgttggtaaaacacaaagccactgaacagtattatgccatgaagatcttagataagcagaaggttgttaaactgaagcaaatagagcatactttgaatgagaaaagaatattacaggcagtgaattttcctttccttgttcgactggagtatgcttttaaggataattctaatttatacatggttatggaatatgtccctgggggtgaaatgttttcacatctaagaagaattggaaggttcagtgagccccatgcacggttctatgcagctcagatagtgctaacattcgagtacctccattcactagacctcatctacagagatctaaaacctgaaaatctcttaattgaccatcaaggctatatccaggtcacagactttgggtttgccaaaagagttaaaggcagaacttggacattatgtggaactccagagtatttggctccagaaataattctcagcaagggctacaataaggcagtggattggtgggcattaggagtgctaatctatgaaatggcagctggctatcccccattctttgcagaccaaccaattcagatttatgaaaagattgtttctggaaaggtccgattcccatcccacttcagttcagatctcaaggaccttctacggaacctgctgcaggtggatttgaccaagagatttggaaatctaaagaatggtgtcagtgatataaaaactcacaagtggtttgccacgacagattggattgctatttaccagaggaaggttgaagctccattcataccaaagtttagaggctctggagataccagcaactttgatgactatgaagaagaagatatccgtgtctctataacagaaaaatgtgcaaaagaatttggtgaattttaaagaggaacaagatgacatctgagctcacactcagtgtttgcactctgttgagagataaggtagagctgagaccgtccttgttgaagcagttacctagttccttcattccaacgactgagtgaggtctttattgccatcatcccgtgtgcgcactctgcatccacctatgtaacaaggcaccgctaagcaagcattgtctgtgccataacacagtactagaccactttcttacttctctttgggttgtctttctcctctcctatatccatttcttccttttccaatttcattggttttctctaaacagtgctccattttattttgttggtgtttcagatgggcagtgttatggctacgtgatatttgaagggaaggataagtgttgctttcagtagttattgccaatattgttgttggtcaatggcttgaagataaactttctaataattattatttctttgagtagctcagacttggttttgccaaaactcttggtaatttttgaagatagactgtcttatcaccaaggaaatttatacaaattaagactaactttcttggaattcactattctggcaataaattttggtagactaatacagtacagctagacccagaaatttggaaggctgtagatcagaggttctagttccctttccctccttttatatcctcctctccttgagtaatgaagtgaccagcctgtgtagtgtgacaaacgtgtctcattcagcaggaaaaactaatgatatggatcatcacccagattctctcacttggtaccagcatttctgtaggtattagagaagagttctaagttttctaaaccttaactgttccttaaggattttagccagtattttaatagaacatgattaatgaaagtgacaaattttaaattttctctaatagtcctcatcataaactttttaaaggaaaataagcaaactaaaaagaacattggtttagataaatacttatactttgcaaagtcaaaaatggcttgatttttggaaacaatatagaggtattcatatttaaatgagggtttacatttgttttgttttgtaaccgttaaaaagaagttgtttccagctaattattgtggtgtactatatttgtgagcctagggtaggggcactgctgcaacttctgctttcatcccatgcctcatcaatgaggaaagggaacaaagtgtataaaactgccacaattgtattttaattttgaggtatgatattttcagatatttcataatttctaacctctgttctctcagtaaacagaatgtctgatcgatcatgcagatacaatgttggtatttgagaggttagtttttttcctacacttttttttgccaactgacttaacaacattgctgtcaggtggaaatttcaagcacttttgcacatttagttcagtgtttgttgagaatccatggcttaacccacttgttttgctatttttttctttgcttttaattttccccatctgattttatctctgcgtttcagtgacctaccttaaaacaacacacgagaagagttaaactgggttcattttaatgatcaatttacctgcatataaaatttatttttaatcaagctgatcttaatgtatataatcattctatttgctttattatcggtgcaggtaggtcattaacaccacttcttttcatctgtaccacaccctggtgaaacctttgaagacataaaaaaaacctgtctgagatgttctttctaccaatctatatgtctttcggttatcaagtgtttctgcatggtaatgtcatgtaaatgctgatattgatttcactggtccatctatatttaaaacgtgcaagaaaaaaataaaatactctgctctagcaagttttgtgtaacaaaggcatatcgtcatgttaataaatttaaaacatcattcgtataaaatattttaattttcttgtatttcatttagacccaagaacatgctgaccaatgtgttctatatgtaaactacaaattctatggtagctttgttgtatattattgtaaaattattttaataagtcatggggatgacaatttgattattacaatttagttttcagtaatcaaaaagatttctatgaattctaaaaaatatttttttctatgaaattactagtgcccagctgtagaatctaccttaggtagatgatccctagacatacgttggttttgagggctattcagccattccattttactctctatttaaaggccgtgagcaagcttgtcatgagcaaatatgtcaagggagtcaatttctgaccaatcaagtacactaaattagaatatttttaaagtatgtaacattcccagtttcagccacaatttagccaagaataagataaaaacttgaataagaagtaagtagcataaatcagtatttaacctaaaattacatatttgaaacagaagatattatgttatgctcagtaaataattaagagatggcattgtgtaagaaggagccctagactgaaagtcaagacatctgaatttcaggctggaaaactatcagtatgatctcagcctcagttctcttgtctgtaaaatggaagaactggattaggcagtttgtaagattcctcctaactttcacagtcgatgacaagattgtctttttatctgatattttgaagggtatattgctttgaagtaagtctcaataaggcaatatattttagggcatctttcttcttatctctgacagtgttcttaaaattatttgaatatcataagagccttggtgtctgtcctaattcctttctcactcaccgatgctgaatacccagttgaatcaaactgtcaacctaccaaaaacgatattgtggcttatgggtattgctgtctcattcttggtatattcttgtgttaactgcccattggcctgaaaatactcattgtaagcctgaaaaaaaaaatctttcccactgttttttctgcttgttgtaagaatcaaatgaaataatgtatgtgaaagcaccttgtaaactgtaacctatcaatgtaaaatgttaaggtgtgttgttatttcattaattacttctttgtttagaatggaatttcctatgcactactgtagctaggaaatgctgaaaacaactgtgttttttaattaatcaataactgcaaaattaaagtaccttcaatggataagacaaaaaaaaaaaaaaaaaa

SEQ ID NO: 318 - DNA, 1943 bp, Homo sapiens
gcaacttgaattggtcccagctgctcccagaagaacgggcgggttggtccctatgccacccctggagagctactcgccgcccactttgccgtgaagggctgtgcggttcccgtgcgcgccggagcctgctgtggcctcttatgcactccaccacccccatcagctccctcttctccttcaccagccccgcagtgaagagactgctaggctggaagcaaggagatgaagaggaaaagtgggcagagaaggcagtggactctctagtgaagaagttaaagaagaagaagggagccatggacgagctggagagggctctcagctgcccggggcagcccagcaaatgcgtcacgattccccgctccctggacgggcggctgcaggtgtcccaccgcaagggcctgccccatgtgatttactgtcgcgtgtggcgctggccggatctgcagtcccaccacgagctgaagccgctggagtgctgtgagttcccatttggctccaagcagaaagaagtgtgcattaacccttaccactaccgccgggtggagactccagtactgcctcctgtgctcgtgccaagacacagtgaatataacccccagctcagcctcctggccaagttccgcagcgcctccctgcacagtgagccactcatgccacacaacgccacctatcctgactctttccagcagcctccgtgctctgcactccctccctcacccagccacgcgttctcccagtccccgtgcacggccagctaccctcactccccaggaagtccttctgagccagagagtccctatcaacactcagactttcgaccagtttgttacgaggagccccagcactggtgctcggtcgcctactatgaactgaacaaccgagttggggagacattccaggcttcctcccgaagtgtgctcatagatgggttcaccgacccttcaaataacaggaacagattctgtcttggacttctttctaatgtaaacagaaactcaacgatagaaaataccaggagacatataggaaagggtgtgcacttgtactacgtcgggggagaggtgtatgccgagtgcgtgagtgacagcagcatctttgtgcagagccggaactgcaactatcaacacggcttccacccagctaccgtctgcaagatccccagcggctgcagcctcaaggtcttcaacaaccagctcttcgctcagctcctggcccagtcagttcaccacggctttgaagtcgtgtatgaactgaccaagatgtgtactatccggatgagttttgttaagggttggggtgctgagtatcatcgccaggatgtcaccagcaccccctgctggattgagattcatcttcatgggccactgcagtggctggacaaagttctgactcagatgggctctccacataaccccatttcttcagtgtcttaacagtcatgtcttaagctgcatttccataggatagaggctattgcagggagtggcttgtatcatttcagatttgcaactgaagtttctaaaaacatgtgtaaatacatagaatgtatactgttcttattttttttaatcaccgtttgttttgtgctttctagttaacctgatgccagtacagtgcaattggaaaagcaggactttggtgcctgtgctataagcagcagattttgtgggaggaaacacttgagaggcgatattgtcaacagtatttgaagggtgttagcagaataaaagacagctttagtcagccgtgtcattataaagcatgttgtgtggcctcacagaaacattgaaactgtttatacagcaaaagtcaggtattagcagcactaaagcaaatatcactcagatgaaacaaagcagtgaaaccctacagtttaaatgatgtcacttttagtgctgttggcaagaaaaaaaaaaaaaaaaaccaaaaaaaaaaaaaaaaaa

SEQ ID NO: 319 - DNA, 1719 bp, Homo sapiens
ggcgatgggaaggcgggcgcagtcgacccaagggtggagaagagggaaggcgaaggacgcgcgttcccgggctcgtgaccgccagcggcccggggaacccgctcccagacagactcggagagatggcaggcggaagacaccggcgcgtcgtgggcaccctccacctgctgctgctggtggccgccctgccctgggcatccaggggggtcagtccgagtgcctcagcctggccagaggagaagaattaccaccagccagccattttgaattcatcggctcttcggcaaattgcagaaggcaccagtatctctgaaatgtggcaaaatgacttacagccattgctgatagagcgatacccgggatcccctggaagctatgctgctcgtcagcacatcatgcagcgaattcagaggcttcaggctgactgggtcttggaaatagacaccttcttgagtcagacaccctatgggtaccggtctttctcaaatatcatcagcaccctcaatcccactgctaaacgacatttggtcctcgcctgccactatgactccaagtatttttcccactggaacaacagagtgtttgtaggagccactgattcagccgtgccatgtgcaatgatgttggaacttgctcgtgccttagacaagaaactcctttccttaaagactgtttcagactccaagccagatttgtcactccagctgatcttctttgatggtgaagaggcttttcttcactggtctcctcaagattctctctatgggtctcgacacttagctgcaaagatggcatcgaccccgcacccacctggagcgagaggcaccagccaactgcatggcatggatttattggtcttattggatttgattggagctccaaacccaacgtttcccaatttttttccaaactcagccaggtggttcgaaagacttcaagcaattgaacatgaacttcatgaattgggtttgctcaaggatcactctttggaggggcggtatttccagaattacagttatggaggtgtgattcaggatgaccatattccatttttaagaagaggtgttccagttctgcatctgataccgtctcctttccctgaagtctggcacaccatggatgacaatgaagaaaatttggatgaatcaaccattgacaatctaaacaaaatcctacaagtctttgtgttggaatatcttcatttgtaatactctgatttagtttaggataattggttctagaattgaattcaaaagtcaaggcatcatttaaaataatctgatttcagacaaatgctgtgtggaaacatctatcctatagatcatcctattcttatgtgtctttggttatcagatcaattacagaataattgtgttgtgatattgtgtcctaaattgctcattaatttttatttacagattgaaaaagagggaccgtgtaaagaaaatggaaaataaatatctttcaaagactcttttagataaacacgatgaggcaaaatcaggttcattcattcaacgatagtttctcaacagtacttaaatagcggttggaaaacgtagccttcattttatgattttttcatatgtggaaatctattacatgtaatacaaaacaaacatgtagtttgaaggcggtcagatttctttgagaaatctttgtagagttaattttatggaaattaaaatcagaattaaatgctaaaaaaaaaaaaaaaaa

SEQ ID NO: 320 - DNA, 4318 bp, Homo sapiens
aagcggctcgggctgcggctggctcagagtgccgcggggggcgtggggcggtgctgaggagctgaagccgtggccagctcgactccggacagtccagcgagcagcacggcgggaaccggcagccggagcagtcccggagcagaagcagcagcagcagcagcagccctcgccgttcgcggagcgcagccgagccggccatggcgttgtcgatgccgctgaatgggctgaaggaggaggacaaagagcccctcatcgagctcttcgtcaaggctggcagtgatggtgaaagcataggaaactgccccttttcccagaggctcttcatgattctttggctcaaaggagttgtatttagtgtgacgactgttgacctgaaaaggaagccagcagacctgcagaacttggctcccgggacccacccaccatttataactttcaacagtgaagtcaaaacggatgtaaataagattgaggaatttcttgaagaggtcttatgccctcccaagtacttaaagctttcaccaaaacacccagaatcaaatactgctggaatggacatctttgccaaattctctgcatatatcaagaattcaaggccagaggctaatgaagcactggagaggggtctcctgaaaaccctgcagaaactggatgaatatctgaattctcctctccctgatgaaattgatgaaaatagtatggaggacataaagttttctacacgtaaatttctggatggcaatgaaatgacattagctgattgcaacctgctgcccaaactgcatattgtcaaggtggtggccaaaaaatatcgcaactttgatattccaaaagaaatgactggcatctggagatacctaactaatgcatacagtagggacgagttcaccaatacctgtcccagtgataaggaggttgaaatagcatatagtgatgtagccaaaagactcaccaagtaaaatcgcgtttgtaaaagagatgtcttcatgtcttcccctaagaatacgcttttcctaacaggctactccttcctgtagagcagaaattgtattttgcacgaacatgcagttattgaagattaggatcaaggatagacaaggtatagtagttatcttaaaatatacactcctaagcagtattattttaaaatcctttaccctggctacctcccctacccgggttcccctctctttaatttggagacactccaccacaaacttttcactttagaggtagcttgccatctctcaggagccctcaccattgtgtccattcactgtgtatagatggcagaacttttgaggtgcaatgtttaattgttaaaaatagtagccacgactttatcaggcagccccaaactggtgcataatgcatggtacaagaaatatttatgtattttttggaattttgtaatatttagtaggagtatatgaaaggattgctactgtatcagaaatattgtttcaatttagtctatcctggatatgtactaacgaatattaccaccagagaagagagctttctacaaaagtcactacagattttgctatattgctttgtagatagatttttacttttgcctaaaagcatttatccttcataccaattgtaacatctgacaccatgtagaagctaaaagtttagagggagtgagcgttttctcaagaccttcctcaagcattttatctttagaagagaaactgatgggcacctgatactctgtctaaatacgtttgttatatgtgttttgccctgtgccattcatttggaactttattgcattctttattttaaaaagcttgtttttacgtaatcatagagcttgctatttgtacatctgttgagcaacactacataactgatttttagttgacttagctatagcagtacaatgattagtaatgtaaaaattaacacagaaattaacctaaggaatgaagggtgggtttgtcaaaatatcaagtaaatttttgtttctaaagtacatttaatgtagatgacctaaagaatgcgttatccatcctatataaaagaaagataaaacacaggtcaccaattttctcatttcaccccatttaccttgtatagaggattgttcattcctttgggactaagttatagttatggtgagtgtgtatttactgtagttttgcctgatctcactcattgcacttcctggagttaaattttccaacagccatgttgaggaatagcactctgcatgtttttgttttgtttttcggggttttttttaattgaagccctaaaccaggaattatttgtgttctaacaggaggatgaacttgctgaaaataaaactttgctatgtatttactcttttttaaaagacaaaagcaaaaccagactttctacgtactactccaaagactgtgattgtgactataatacatttttggtaatttttttatacctaatttgtataggaagtgctatttctcataggctgtttcttgaaattttaagtttattgctttaaaatggcagtgtttctcccactttgatatgctaacatttagtaagcactggctttatgaaagcggctttttataagtatactgcattttttgagcctatcattaattagcttagtatgaaagataagaaaatctccatgttgtatccatttggctcaggaagattctttgccttacctttcttagaactctttattgcttatcaaaagtttgagtacccgcttggtttttttttggtaattaaatattgtatgatttatctggttcaaggaagatgcactattcagttatctattgagaaattattttgcagtggttttagtgggtgaaaatgtcccatctgcaccagtacacaggcaggcattatcattcttcacctactttttaaatagtggcaacttgggattctttctggtgattctgaaccttgcctcatagcttaaagtataaaaaaagattcaagagcagtgaggtttgttctttccagtgaatggtggactgagtggtgcgaggtggagggctaacaagaggaaagaactacattcttcagaatacagtgatgaaaattcattttgaaactcaaatattttcattttggatattctcctgtttttattaaaccagtgattacacctggccatccctctaaatgttctaggaaggcatgtctattgtgattttgatgaagacagaattatttttctctgtagaaacacagataccactttatcagggaagttagtcaaatgaaatggaaattggtaaatggacaaaagctagctagtaaaaaggacgacccagcaacatgctttaaccccattgtatgtttgtggaaagagcatagtttaacatcttgagaaatttgggacataaagttttcatggtagacagttcatgcagtatatgaattgacataatggaaataatctgattttatttttacaactaacatccattccccttcatttaaacaccttttgtgttttacttcagtgaggagattggagtctgaatggatctgttttccaagagattctgagaaatttttgtattcagcagttggaaagctctctattctagttgataaaacttcccttttttgatgtagatgcagatattctatacagttctgttgtcttttactaggactgtaaacttttgtgataaaattcaaataagattttatttctttgtaattttggctttcacaatttatctttaaatccttgagcaatctgtatacaattaagagatttctgacatttattcttacactaaatggatcaactctaggatttaggcatgttaacttctgttgtgttttgaatctctccagagttgcatgtagatagcatttatttctgtgcccttaaacccatttagaaaataactacaaagtaaaaatgtagaggaaatagaaatgtattttttcatgaacattttgatacaaatttcatcatttaatgattcaccaatttcttgcattaatttgaatttaagcatttaattcaaagagaggggagcatccattattggtacatgtgggcttttaaaaactccatcctttataaatagtcaaggtttgggccacacaaagtatatttttatcatggaaaaatttcaactcctcaagccgtaatgttgaacagaattggagtattttctttataatttcttgaacaggcaaatgaaagcttattatagaatgcatgtattttcttttatctttggaacatcagcaccagtatattgctggcagctattgtattaaaaaataaagtatattttcactatcaaaaaaaaaaaaaaaaaaaaaaaaaaaa

SEQ ID NO: 321 - DNA, 1203 bp, Homo sapiens
gatctggggtgctgccaggaaaaagcaaattctggaagttaatggttttgagtgatttttaaatccttgctggcggagaggcccgcctctccccggtatcagcgcttcctcattctttgaatccgcggctccgcggtcttcggcgtcagaccagccggaggaagcctgtttgcaatttaagcgggctgtgaacgcccagggccggcgggggcggggccgaggcgggccattttgaataaagaggcgtgccttccaggcaggctctataagtgaccgccgcggcgagcgtgcgcgcgttgcaggtcactgtagcggacttcttttggttttctttctctttggggcacctctggactcactccccagcatgaaggcgctgagcccggtgcgcggctgctacgaggcggtgtgctgcctgtcggaacgcagtctggccatcgcccggggccgagggaagggcccggcagctgaggagccgctgagcttgctggacgacatgaaccactgctactcccgcctgcgggaactggtacccggagtcccgagaggcactcagcttagccaggtggaaatcctacagcgcgtcatcgactacattctcgacctgcaggtagtcctggccgagccagcccctggaccccctgatggcccccaccttcccatccagacagccgagctcgctccggaacttgtcatctccaacgacaaaaggagcttttgccactgactcggccgtgtcctgacacctccagaacgcaggtgctggcgcccgttctgcctgggaccccgggaacctctcctgccggaagccggacggcagggatgggccccaacttcgccctgcccacttgacttcaccaaatcccttcctggagactaaacctggtgctcaggagcgaaggactgtgaacttgtagcctgaagagccagagctagctctggccaccagctgggcgacgtcaccctgctcccaccccacccccaagttctaaggtcttttcagagcgtggaggtgtggaaggagtggctgctctccaaactatgccaaggcggcggcagagctggtcttctggtctccttggagaaaggttctgttgccctgatttatgaactctataatagagtatataggttttgtaccttttttacaggaaggtgactttctgtaacaatgcgatgtatattaaactttttataaaagtt

SEQ ID NO: 322 - DNA, 1974 bp, Homo sapiens
cgcgcggggaagggaagaagaggacgaggtggcgcagagaccgcgggagaacacagtgcctccggaggaaatctgctcggtccccggcagccgcgcttcccctttgatgttttggtacgccgtggccatgcgcctcacattagaattactgcactgggcagactaagttggatctcctctcttcagtgaaaccctcaattccatcaaaaactaaagggatgtggagagtccggaaaaggggctactttgggatttggtccttccccttaataatcgccgctgtctgtgcgcagagtgtcaatgaccctagtaatatgtcgctggttaaagagacggtggatagactcctgaaaggctatgacattcgtctgagaccagattttggaggtccccccgtggctgtggggatgaacattgacattgccagcatcgatatggtttctgaagtcaatatggattataccttgacaatgtactttcaacaagcctggagagataagaggctgtcctataatgtaatacctttaaacttgactctggacaacagagtggcagaccagctctgggtgcctgatacctatttcctgaacgataagaagtcatttgtgcacggagtgactgttaagaaccgcatgattcgcctgcatcctgatggcaccgtcctttatggactcagaatcacaaccacagctgcctgcatgatggacctaaggaggtacccactggatgaacaaaactgcaccttggaaattgagagctatggatacacaactgatgacattgagttttactggcgtggcgatgataatgcagtaacaggagtaacgaaaattgaacttccacagttctctattgtagattacaaacttatcaccaagaaggttgttttttccacaggttcctatcccaggttatccctcagctttaagcttaagagaaacattggctactttatcctgcaaacatacatgccttccatcctgattaccatcctctcctgggtctccttctggattaattacgatgcttcagctgcaagggtggcattaggaatcacaactgtcctcacaatgaccacaatcaacacccacctccgggaaactctccctaaaatcccctatgtgaaggccattgacatgtacctgatggggtgctttgtcttcgttttcatggcccttctggaatatgccctagtcaactacatcttctttgggagggggccccaacgccaaaagaaagcagctgagaaggctgccagtgccaacaatgagaagatgcgcctggatgtcaacaagattttttataaagatattaaacaaaatgggacccaatatcgatccttgtgggaccctactggaaacctctccccaactagacggactaccaattacgatttctctctgtatacgatggacccccatgagaacatcttactgagcactctcgagataaaaaatgaaatggccacatctgaggctgtgatgggacttggagaccccagaagcacaatgctagcctatgatgcctccagcatccagtatcggaaagctgggttgcccaggcatagttttggccgaaatgctctggaacgacatgtggcgcaaaagaaaagtcgcctgaggagacgcgcctcccaactgaaaatcaccatccctgacttgactgatgtgaatgccatagatcggtggtcccgcatattcttcccagtggttttttccttcttcaacatcgtctattggctttactatgtgaactaaacatggcctcccactggaagcaaggactagattcctcctcaaaccagttgtacagcctgatgtaggacttggaaaacacatcaatccaggacaaaagtgacgctaaaataccttagttgctggcctatcctgtggtccatttcataccatttgggttgcttctgctaagtaatgaatacactaaggtccttgtggttttccagttaaaacgcaagta

SEQ ID NO: 323 - DNA, 2819 bp, Homo sapiens
ctgggcccagctcccccgagaggtggtcggatcctctgggctgctcggtcgatgcctgtgccactgacgtccaggcatgaggtggttcctgccctggacgctggcagcagtgacagcagcagccgccagcaccgtcctggccacggccctctctccagcccctacgaccatggactttaccccagctccactggaggacacctcctcacgcccccaattctgcaagtggccatgtgagtgcccgccatccccaccccgctgcccgctgggggtcagcctcatcacagatggctgtgagtgctgtaagatgtgcgctcagcagcttggggacaactgcacggaggctgccatctgtgacccccaccggggcctctactgtgactacagcggggaccgcccgaggtacgcaataggagtgtgtgcacaggtggtcggtgtgggctgcgtcctggatggggtgcgctacaacaacggccagtccttccagcctaactgcaagtacaactgcacgtgcatcgacggcgcggtgggctgcacaccactgtgcctccgagtgcgccccccgcgtctctggtgcccccacccgcggcgcgtgagcatacctggccactgctgtgagcagtgggtatgtgaggacgacgccaagaggccacgcaagaccgcaccccgtgacacaggagccttcgatgctgtgggtgaggtggaggcatggcacaggaactgcatagcctacacaagcccctggagcccttgctccaccagctgcggcctgggggtctccactcggatctccaatgttaacgcccagtgctggcctgagcaagagagccgcctctgcaacttgcggccatgcgatgtggacatccatacactcattaaggcagggaagaagtgtctggctgtgtaccagccagaggcatccatgaacttcacacttgcgggctgcatcagcacacgctcctatcaacccaagtactgtggagtttgcatggacaataggtgctgcatcccctacaagtctaagactatcgacgtgtccttccagtgtcctgatgggcttggcttctcccgccaggtcctatggattaatgcctgcttctgtaacctgagctgtaggaatcccaatgacatctttgctgacttggaatcctaccctgacttctcagaaattgccaactaggcaggcacaaatcttgggtcttggggactaacccaatgcctgtgaagcagtcagcccttatggccaataacttttcaccaatgagccttagttaccctgatctggacccttggcctccatttctgtctctaaccattcaaatgacgcctgatggtgctgctcaggcccatgctatgagttttctccttgatatcattcagcatctactctaaagaaaaatgcctgtctctagctgttctggactacacccaagcctgatccagcctttccaagtcactagaagtcctgctggatcttgcctaaatcccaagaaatggaatcaggtagacttttaatatcactaatttcttctttagatgccaaaccacaagactctttgggtccattcagatgaatagatggaatttggaacaatagaataatctattatttggagcctgccaagaggtactgtaatgggtaattctgacgtcagcgcaccaaaactatcctgattccaaatatgtatgcacctcaaggtcatcaaacatttgccaagtgagttgaatagttgcttaattttgatttttaatggaaagttgtatccattaacctgggcattgttgaggttaagtttctcttcacccctacactgtgaagggtacagattaggtttgtcccagtcagaaataaaatttgataaacattcctgttgatgggaaaagcccccagttaatactccagagacagggaaaggtcagcccgtttcagaaggaccaattgactctcacactgaatcagctgctgactggcagggctttgggcagttggccaggctcttccttgaatcttctcccttgtcctgcttggggttcataggaattggtaaggcctctggactggcctgtctggcccctgagagtggtgccctggaacactcctctactcttacagagccttgagagacccagctgcagaccatgccagacccactgaaatgaccaagacaggttcaggtaggggtgtgggtcaaaccaagaagtgggtgcccttggtagcagcctggggtgacctctagagctggaggctgtgggactccaggggcccccgtgttcaggacacatctattgcagagactcatttcacagcctttcgttctgctgaccaaatggccagttttctggtaggaagatggaggtttaccggttgtttagaaacagaaatagacttaataaaggtttaaagctgaagaggttgaagctaaaaggaaaaggttgttgttaatgaatatcaggctattatttattgtattaggaaaatataatatttactgttagaattcttttatttagggccttttctgtgccagacattgctctcagtgctttgcatgtattagctcactgaatcttcacgacaatgttgagaagttcccattattatttctgttcttacaaatgtgaaacggaagctcatagaggtgagaaaactcaaccagagtcacccagttggtgactgggaaagttaggattcagatcgaaattggactgtctttataacccatattttccccctgtttttagagcttccaaatgtgtcagaataggaaaacattgcaataaatggcttgattttttaaaaaaaaaaaaaaaaaaaaaaa

SEQ ID NO: 324 - DNA, 1122 bp, Homo sapiens
ggcctggctcggtccctgcgcaccgggtgcgggcggcggagagggcgcggctggtgagccctgggagggcccaggagccagacctcggttttgcgggctggggagcagggctcgggggcagcggccaggcccctccgcccctaacacccgcgcctcctgcagacccgagggtcgccgctggtagggtcgctcagccctgccgtccttcaccaccacaccttcacctgcgcccagctccctgcgcgcctggacagcgcctgctgcccgcctcccgatggccctgccccagatgtgtgacgggagccacttggcctccaccctccgctattgcatgacagtcagcggcacagtggttctggtggccgggacgctctgcttcgcttggtggagcgaaggggatgcaaccgcccagcctggccagctggccccacccacggagtatccggtgcctgagggccccagccccctgctcaggtccgtcagcttcgtctgctgcggtgcaggtggcctgctgctgctcattggcctgctgtggtccgtcaaggccagcatcccagggccacctcgatgggacccctatcacctctccagagacctgtactacctcactgtggagtcctcagagaaggagagctgcaggacccccaaagtggttgacatccccacttacgaggaagccgtgagcttcccagtggccgaggggcccccaacaccacctgcataccctacggaggaagccctggagccaagtggatcgagggatgccctgctcagcacccagcccgcctggcctccacccagctatgagagcatcagccttgctcttgatgccgtttctgcagagacgacaccgagtgccacacgctcctgctcaggcctggttcagactgcacggggaggaagttaaaggctcctagcaggtcctgaatccagagacaaaaatgctgtgccttctccagagtcttatgcagtgcctgggacacagtaggcactcagcaaacgttcgttgttgaaggctgttctatttatctattgctgtataacaaaccaccccagaatttagtggcttaaaataaatcccattttattatgtctcaaaaaaaaaaaaaaaaaaaaaaaaaa

SEQ ID NO: 325 - DNA, 1683 bp, Homo sapiens
agaaacggcagtggcagcagcgtccggagcagccgcagccttctggaagctccaggcggtctttctgccgagcctcggtcccggcccccatcctccccgccccatcggttgttgtctgggcggatttaaacagtcaagtaaaatcaagctgggtaatcatggcagaaggtggatttgatccctgtgaatgtgtttgctctcatgaacatgcaatgagaagactgatcaatctgttacggcagtcccagtcctactgcacagacacagagtgtcttcaggaattaccgggaccctctggtgataatggcatcagtgttacaatgatcttggtagcctggatggttattgcattgatcttgttcttactgagacctcctaatctaagaggatccagcctacctggaaagccaaccagtcctcataatggacaagatccaccagctcctcctgtggactaactttgtgatatgggaagtgaaaatagttaacaccttgcacgaccaaacgaacgaagatgaccagagtactcttaaccccattagaactgtttttccttttgtatctgcaatatgggatggtattgttttcatgagcttctagaaatttcacttgcaagtttatttttgcttcctgtgttactgccattcctatttacagtatatttgagtgaatgattatatttttaaaaagttacatggggcttttttggttgtcctaaacttacaaacattccactcattctgtttgtaactgtgattataatttttgtgataatttctggcctgattgaaggaaatttgagaggtctgcatttatatattttaaatagatttgataggtttttaaattgctttttttcataaggtatttataaagttatttggggttgtctgggattgtgtgaaagaaaattagaaccacgctgtatttacatttaccttggtagtttatttgtggatggcagttttctgtagttttggggactgtggtagctcttggattgttttgcaaattacagctgaaatctgtgtcatggattaaactggcttatgtggctagaataggaagagagaaaaaatgaaatggttgtttactaattttatactcccattaaaaatctctaatgttaagaaaaccttaaataaacatgattgatcaatatggcagatgatttacagtccattatatgacatttgtaagccactcaacactagccttacaaggttcatgaaaggaggaaaacattaattctttctgcctttgctgatataatccacatagtaataatttaagctataatttatttttaaaatgagtgcctcttgggaagcttcttttctgttctaacagttccctgttaaaatgaaaatcttaggccagtgcagtggctcacacctgtaatctcagcactttgggaggctgaggtgggtggatcacttgaggtcaggagttcgagaccagcctggccaacatggtgaaaccctgtctctactaaaaatacagaaaaattagccagggttggtgcatgtgcctgtaatcccagctactcaggaggccaaagcaggagaattgcttgaacccgggaggtggaggttgcagtgaaccaagatcgcaccactgcattccagcctaagcaatagagcgagactccctcccaaaaaaaaaaaaaaaaaaaaaaaaaaa

SEQ ID NO: 326 - DNA, 4391 bp, Homo sapiens
tgcagcgctggtcgcagccctcagctgcgccgggcggttccggctcctccctctccttgtgcctcagcgccaccatggtgctggagtcggtggtcgcggacttgctgaaccgcttcctgggggactatgtggagaacctgaacaagtcccagctgaagctgggcatctggggcggaaatgtggctttagataatctacagataaaagaaaatgccctgagtgaattggatgttccttttaaagtcaaggctggccaaattgataaattaactttgaagattccttggaagaacctttatggagaagcagttgttgcgaccctggaaggattatacctgcttgttgtccctggagcaagtattaagtatgatgctgtaaaagaagaaaaatccttgcaggatgttaaacagaaagagctatcccgaattgaagaagcccttcaaaaagcagcagaaaaaggcacacattcaggggagttcatatatggcttggagaactttgtttacaaggacatcaagcctggacgtaaacgtaaaaagcacaaaaaacattttaagaaaccttttaaaggtcttgatcgttcaaaagataagccaaaagaagccaaaaaggatacatttgtggaaaaattggcaactcaagtaataaaaaatgtacaagtaaaaatcacagatattcacattaaatatgaagatgatgtcactgatccaaagcggcctctttcatttggtgtcacactgggagagcttagtctactgactgcaaatgaacactggactccatgcatattaaatgaagcagacaaaattatatacaagcttatacgacttgatagtcttagcgcctactggaatgtaaattgcagcatgtcttaccagagatcaagggaacagattttggatcagctgaaaaatgaaattcttacaagtggaaatatacccccaaattatcaatacattttccagccaatatcagcctctgcaaaactctacatgaatccttatgcagaatcagagctcaaaacgcccaaactggattgcaacatagaaatacaaaatattgccattgaactgaccaaacctcagtacttaagtatgattgaccttttggagtcagtggattatatggttaggaatgcgccttataggaaatacaagccttatttaccacttcataccaatggtcgacgatggtggaaatatgcaattgattctgttcttgaagttcatataagaaggtatacacagatgtggtcatggagtaacataaaaaagcacaggcagttactcaagagttataaaattgcctacaaaaacaagttaacacagtctaaagtctcagaagaaatacagaaagaaattcaggacttggagaagactctagatgtttttaacataattttagcaaggcaacaagcacaagttgaggtgattcggtctgggcaaaaattaaggaaaaagtctgctgacacaggcgagaaacgtggaggctggtttagtgggttgtggggtaagaaagagtctaagaaaaaggacgaagaatcattgattcctgaaactattgatgaccttatgactccagaggaaaaagataaactcttcactgccattggttatagtgagagtacccacaacctaactttacctaagcagtatgttgcccatattatgaccctgaagttagtaagcacctctgttacgataagagaaaacaagaatattccagaaatactaaaaattcagataattggcctgggcactcaagtatctcagcgaccaggagcacaagcacttaaggtagaagcgaaattagaacactggtatataacaggtttgagacagcaggatattgtgccatcacttgtggcttcaattggtgacactacatcatccttgcttaaaattaaatttgaaaccaatccggaggatagtcctgctgaccagactctgattgttcagtcccagcctgtggaggtcatctatgatgctaaaactgtcaatgcagtggttgaattctttcaatcaaataagggattggatcttgagcaaataacatcagcaacattgatgaagctggaagaaattaaggagagaacagctacaggacttacacatattattgaaactcgaaaagtccttgatttaaggataaatctgaagccttcttatctagtagttccacagacgggtttccaccatgaaaagtcagatcttctgattttagattttggtacatttcagctcaacagtaaagatcaaggtttacagaagactactaattcatctctggaagaaataatggataaggcatatgacaagtttgatgttgaaataaaaaatgtacaactactttttgcaagagcagaggaaacctggaaaaagtgtcgatttcagcatccatcaactatgcatatattgcaacccatggatattcatgttgagttggctaaggccatggtagaaaaagacattagaatggccagatttaaagtgtcaggaggacttcctttgatgcatgtgagaatttctgaccagaagatgaaagatgtgctatatttgatgaacagtatacctttgccacagaaatcatcagcccagtctccagagagacaggtatcctcaattcctattatttcaggtggtacaaaaggtctacttggtacttcactattgctagacactgtggaatcagagtctgatgatgagtattttgatgctgaagatggagaaccacagacttgtaaaagtatgaaaggatcagaacttaaaaaagctgcagaggtcccaaatgaggagctcatcaatcttctactcaagtttgaaattaaagaagtgattttggaatttactaaacagcagaaagaagaagatacaattctagtatttaatgttactcagttaggaacagaggccacaatgagaacatttgacttaactgtggtatcttatttaaagaaaatcagcttggattatcatgaaattgaaggatccaaaaagaagccccttcacttgattagctcttctgacaaacctggattagatcttttgaaagtggagtatattaaggctgataagaatggacctagttttcaaactgcttttggaaaaactgaacaaacagttaaggtggccttttcatctttaaatctgttgctgcaaacacaagctcttgtcgcttctattaattacctcacaaccattattccatctgatgatcaaagcataagtgttgctaaggaggtacaaatttcaactgaaaaacaacaaaaaaattcaactctgccaaaagcgattgtatcctccagagatagtgacattattgatttcaggctatttgccaagttgaatgctttctgtgtcattgtttgcaacgaaaagaacaatatcgccgaaatcaagattcaaggactggattcctccctttctctccagtcaagaaagcagtcactttttgcccgactagaaaatattattgtcacagatgttgatccaaagacagttcataagaaagctgtgtcaataatgggaaatgaagttttccgttttaatttggatttgtatccagatgctactgagggggatttgtatactgacatgtccaaagtggatggtgtgctgtctctgaatgttggctgtattcagattgtctatcttcataaattccttatgtcacttctgaacttcctgaataatttccagacagccaaagagtctctgagtgctgccactgcccaggctgcagaaagggctgccacaagtgtgaaagatcttgcccagaggagttttcgtgtttccatcaatattgatttgaaagcaccggttatagtcatcccacagtcttctatttccaccaatgcagtagtggtagatcttgggttaatcagagttcataatcagttcagtctggtgtctgatgaagactacttaaatcctccagtaattgatagaatggatgtgcagctaacaaagcttacactttataggacagtgatccagccaggcatctaccatcctgatattcagctgttgcacccaattaacttggaatttcttgtaaatcggaatctagctgcatcttggtaccacaaggtgcctgttgtggaaattaaaggacatcttgattcaatgaatgttagtctaaatcaagaagatcttaatcttttatttaggatactaacagaaaatctctgtgagggtactgaagacttggataaagtgaaaccaagagtacaagagacaggtgaaattaaagagccccttgaaatctctatatcacaagatgtacatgattcaaaaaatactttaacaactggagtggaagaaattaggtctgtagacatcattaatatgctgctgaattttgaaattaaagaggttgtggttactttgatg

SEQ ID NO: 327 - DNA, 698 bp, Homo sapiens
tcatctttgggtggtggagtgcaaaggaggcgacctgcaacagaggagtcccggtcaccagcaaccatgacggaccagcaggctgaggccaggtcctacctcagcgaagagatgatcgctgagttcaaggctgcctttgacatgtttgatgctgatggtggtggggacatcagcgtcaaggagttgggcacggtgatgaggatgctgggccagacacccaccaaggaggagctggacgccatcatcgaggaggtggatgaggacggcagcggcaccatcgacttcgaggagttcttggtcatgatggtgcgccagatgaaagaggacgcgaaagggaagagcgaggaggagctggccgagtgcttccgcatcttcgacaggaatgcagacggctacatcgacccggaggagctggctgagattttcagggcctccggggagcacgtgacggacgaggagatcgaatctctgatgaaagacggcgacaagaacaacgacggccgcattgacttcgacgagttcctgaagatgatggagggcgtgcagtaaggagtggacagtcgcctctaccaagatcgcgtgtccctagggtgtgggagactccgccctgccgggtccccaccagggaggcgcgaccccttgtgggtctttgtctggaaggaataaaagcaaatgttccaaaaaaaaaaaaaaaaaaa

SEQ ID NO: 328 - DNA, 3250 bp, Homo sapiens
gaagaggccaagctgaaaaaggtagccagaatgggatttaatgcatcttccatgctccgaaaaagccagctaggtttcctcaacgtcaccagttactaccgtttagccaacgagctgcgtgtgagctgcatggagcggaaaaaggtccaaattcggagcttggatccctcctctttggcgagcgaccgatttaacttcattctggcgagtaccaacagcgaccagctcttcgtagtgaaccaggtcgaagtcgaaggctccaagtacggcatcatcagtctgcgaactctgaagatcccttcgttccacgtgtacgtgctcagaaacctctacgtccccaaccggaaggtgaagtccctgtgctgggcctcgctgaaccagttggactctcacgttctgctgtgcttcgagggaatcacagatgctccaagctgtgcagtgctgctcccagcgtcgcggttcttaagtgttcacacaagagttaaccagcctggcatgctctgcagtttccagatcccagaggcctggtcctgtgcgtggtccctcaacacccgggcatatcactgctttagtgcaggcttgtctcagcaggtcctgttgaccagcgtggcgacgggacaccagcagtcatttgataccagcagtgatgtcttggcccagcagtttgctagtacggctcctttgctgtttaatggctgtcgctccggggagatctttgccattgatctgcgttgtagaaatcgaggcaaggggtggagggccactcgcctgttccatgactcagcagtgacctctgtgcaaatcctccaagaagagcaatgcctgatggcatcagacatgactggaaagatcaagctgtgggatctgagggccactaaatgtgtaaggcagtacgaaggtcacgtgaatgagtccgcctatctgcccctgcatgtgcacgaggaagagggaatcgtggtggcagtgggccaggactgctacacgagaatctggagcctccatgatgcccacctgctcagaaccatcccttccccgtactctgcctccgaggacgacattcccagcgtggccttcgcttctcggctcgggggcatccggggagcagcaccagggctgctcatggctgtccggcaggacctttattgtttccccttcagctaattctgcaggtggcagcgcggccgaatgtggatttgacttaaggaagttaagagtatcttattaccgtttctgtgagagcattttaagagacgtgttgtatgtagatcgcatccatccggctgccaggggtaaggtgttaagagttttatgtggagacgttcttgtaaagttatttcagttaaactgtggacttaacttgaaagtccttttcataaaaggtacctgtttcctcttgttgaatgccttagaacagttaaccacctccccaacccttttttttttttaaataattaagacttttctaaggactgaagattggcaaaaactaaaataaattaaagcagcttctttcactagtagccctttagagaagcataatgatggtactggtaagactgtttgactaatcatacagggtcccaggcatctgcgcttgaggaagccagtgggagtggagacaagggagaggtaatttctcggagtctctacagaaatatttaaggctggagtttggaatcattaaatttggccttctcaaactcaatagcagatctcttaaggttctccttttattgttatcatccataggcattggaaggaaagatggatctttttaaatactagaagttttaaacagtccttgatgtgcttttgttgaggtacctttcagaatgtaaggtacagcagcttcggtttctattatggtgacttgaagttcagattcaaggaattggctttgactttttgtaatctaggagcagcagtttgtgagagatttattaaaaatgttaaagagcctgtttttctactaagcaaggaagaaaaaaaacgtgtaataaggttagttgctacttcttaatagccaaagcctggaaatgatctgaatttcgaaaatgctaaaattcgtgatataatcatacaatcggatactgcataataatagaaaataaggcacacttgctatgtgaaacagtatagaccaatctcaacatgttgactgaaattaggtagaaatgagtacaaactgtatgattcaattctaaagttcaaaagcagtaaaaacttgtctatggtgattaaaggtagagtagtacgtacctctgtagaaagaaaggattttttttctttttctttttaggatgtttgagaagtgacatggggaagctttaggaatgctgagttttctttatcttgacacttgatacatacgtaattcatatatctatatgcttcacgtttttatagtttactgtatatatgttattcctcaaaaaataaaaataagcaattaggacactattgtagttaggcaagggacaatgatgccttggacctgcatgtgtgagaagtagaaatgatcagaaatgattgcattggaagatcattcgaaggtagtattattgataaggcttgctgatgagagtaaactagaaagtgaaagaaaaaaggatggcagcttttttttttttttttttttgagacggagtctccttctgtcgcccaggctggagtgcagtggcgcgatctcggctcactgcaagctctgaggatggcagcttttttgttaactttagaactggtagatgatggtgtcgtttactaacctggggaggatgaggagaaaaaactttaggtgaagggaatgatgctgagttttagacatctactaaacctccaattggagatacaaagtattctgcagatcaggggtcatgtcatggctggtaacaaatttggtgacttcaatacatagaattaaaatagatgggatagatgtgctttatatgacatagatgaggttaatgtaattacatattgatagaagatgagtagatcaatagagaagatatgggagtgtggttaggcacagatttttggaatcctttcagtcagttttttatactaacttgatatgtgacatgagaaattgtgtaagctttacttgctgttgtttcttcagtgtaaaatgtcttagataataaaactaaatgataaagtagatacagggttaaaggatatgtatcttgtcccttttacattgtaagcattcaaaataaaacaaaacaattaatgaaaaaaaaaaaaaaaa

SEQ ID NO: 329 - DNA, 2486 bp, Homo sapiens
acactgcctcggttcggcaagtgggtcagttggctggggctcacttggcaacgggacgcgggaacgaggggcgcggacgcaggcccgggaggacgcggcggcgggaacctgggggcgcagggctagggcagcgggcccgacccgcacggctttcctggaaagcgctgcccctcgccgcggcgatgacctcgctgtggagagaaatcctcttggagtcgctgctgggatgtgtttcttggtctctctaccatgacctgggaccgatgatctattactttcctttgcaaacactagaactcactgggcttgaaggttttagtatagcatttctttctccaatattcctaacaattactcctttctggaaattggttaacaagaagtggatgctaaccctgctgaggataatcactattggcagcatagcctccttccaggctccaaatgccaaacttcgactgatggttcttgcgcttggggtgtcttcctcactgatagtgcaagctgtgacttggtggtcaggaagtcatttgcaaaggtacctcagaatttggggattcattttaggacagattgttcttgttgttctacgcatatggtatacttcactaaacccaatctggagttatcagatgtccaacaaagtgatactgacattaagtgccatagccacacttgatcgtattggcacagatggtgactgcagtaaacctgaagaaaagaagactggtgaggtagccacggggatggcctctagacccaactggctgctggcaggggctgcttttggtagccttgtgttcctcacccactgggtttttggagaagtctctcttgtttccagatgggcagtgagtgggcatccacatccagggccagatcctaacccatttggaggtgcagtactgctgtgcttggcaagtggattgatgcttccatcttgtttgtggtttcgtggtactggtttgatctggtgggttacaggaacagcttcagctgcggggctcctttacctgcacacatgggcagctgctgtgtctggctgtgtcttcgccatctttactgcatccatgtggccccaaacacttggacaccttattaactcagggacaaaccctgggaaaaccatgaccattgccatgatattttatcttctagaaatatttttctgtgcctggtgcacagcttttaagtttgtcccaggaggtgtctacgctagagaaagatcagatgtgcttttggggacaatgatgttaattatcgggctgaatatgctatttggtcctaagaaaaaccttgatttgcttcttcaaacaaaaaacagttctaaagtgcttttcagaaagagtgaaaaatacatgaaactttttctgtggctgcttgttggtgtgggattgttgggattaggactacggcataaagcctatgagagaaaactgggcaaagtggcaccaaccaaagaggtctctgctgccatctggcctttcaggtttggatatgacaatgaagggtggtctagtctagaaagatcagctcacctgctcaatgaaacaggtgcagatttcataacaattttggagagtgatgcttctaagccctatatggggaacaatgacttaaccatgtggctaggggaaaagttgggtttctatacagactttggtccaagcacaaggtatcacacttgggggattatggctttgtcaagatacccaattgtgaaatctgagcatcaccttcttccgtcaccagagggcgagatcgcaccagccatcacattgaccgttaacatttcgggcaagctggtggattttgtcgtgacacactttgggaaccacgaagatgacctcgacaggaaactgcaggctattgctgtttcaaaactactgaaaagtagctctaatcaagtgatatttctgggatatatcacttcagcacctggctccagagattatctacagctcactgaacatggcaatgtgaaggatatcgacagcactgatcatgacagatggtgtgaatacattatgtatcgagggctgatcaggttgggttatgcaagaatctcccatgctgaactgagtgattcagaaattcagatggcaaaatttaggatccctgatgaccccactaattatagagacaaccagaaagtggtcatagaccacagagaagtttctgagaaaattcattttaatcccagatttggatcctacaaagaaggacacaattatgaaaacaaccataattttcatatgaatactcccaaatactttttatgaaacatttaaaacaagaagttattggctgggaaaatctaagaaaaaaagtatgtaagataaaaagaagagattaatgaaagtgggaaaatacacatgaagaacctcaacttaaaaaacacatggtatctatgcagtgggaaattacctccatttgtaaactatgttgcttaataaaaacatttctctaaaaaaaaaaaaaaaaaa

SEQ ID NO: 330 - DNA, 3675 bp, Homo sapiens; identical to SEQ ID NO: 283

SEQ ID NO: 331 - DNA, 3103 bp, Homo sapiens
cggagagccgcgcagggcgcgggccgcgcggggtggggcagccggagcgcaggcccccgatccccggcgggcgcccccgggcccccgcgcgcgccccggcctccgggagactggcgcatgccacggagcgcccctcgggccgccgccgctcctgcccgggcccctgctgctgctgctgtcgcctgcgcctgctgccccaactcggcgcccgacttcttcatggtgtgcggaggtcatgttcgctccttagcaggcaaacgacttttctcctcgcctcctcgccccgcatgttcaggaccaaacgatctgcgctcgtccggcgtctctggaggagccgtgcgcccggcggcgaggacgaggaggagggcgcagggggaggtggaggaggaggcgagctgcggggagaaggggcgacggacagccgagcgcatggggccggtggcggcggcccgggcagggctggatgctgcctgggcaaggcggtgcgaggtgccaaaggtcaccaccatccccacccgccagccgcgggcgccggcgcggccgggggcgccgaggcggatctgaaggcgctcacgcactcggtgctcaagaaactgaaggagcggcagctggagctgctgctccaggccgtggagtcccgcggcgggacgcgcaccgcgtgcctcctgctgcccggccgcctggactgcaggctgggcccgggggcgcccgccggcgcgcagcctgcgcagccgccctcgtcctactcgctccccctcctgctgtgcaaagtgttcaggtggccggatctcaggcattcctcggaagtcaagaggctgtgttgctgtgaatcttacgggaagatcaaccccgagctggtgtgctgcaacccccatcaccttagccgactctgcgaactagagtctcccccccctccttactccagatacccgatggattttctcaaaccaactgcagactgtccagatgctgtgccttcctccgctgaaacagggggaacgaattatctggcccctggggggctttcagattcccaacttcttctggagcctggggatcggtcacactggtgcgtggtggcatactgggaggagaagacgagagtggggaggctctactgtgtccaggagccctctctggatatcttctatgatctacctcaggggaatggcttttgcctcggacagctcaattcggacaacaagagtcagctggtgcagaaggtgcggagcaaaatcggctgcggcatccagctgacgcgggaggtggatggtgtgtgggtgtacaaccgcagcagttaccccatcttcatcaagtccgccacactggacaacccggactccaggacgctgttggtacacaaggtgttccccggtttctccatcaaggctttcgactacgagaaggcgtacagcctgcagcggcccaatgaccacgagtttatgcagcagccgtggacgggctttaccgtgcagatcagctttgtgaagggctggggtcagtgctacacccgccagttcatcagcagctgcccgtgctggctagaggtcatcttcaacagccggtagccgcgtgcggaggggacagagcgtgagctgagcaggccacacttcaaactactttgctgctaatattttcctcctgagtgcttgcttttcatgcaaactctttggtcgttttttttttgtttgttggttggttttcttcttctcgtcctcgtttgtgttctgttttgtttcgctctttgagaaatagcttatgaaaagaattgttgggggtttttttggaagaaggggcaggtatgatcggcaggacaccctgataggaagaggggaagcagaaatccaagcaccaccaaacacagtgtatgaaggggggcggtcatcatttcacttgtcaggagtgtgtgtgagtgtgagtgtgcggctgtgtgtgcacgcgtgtgcaggagcggcagatggggagacaacgtgctctttgttttgtgtctcttatggatgtccccagcagagaggtttgcagtcccaagcggtgtctctcctgccccttggacacgctcagtggggcagaggcagtacctgggcaagctggcggctggggtcccagcagctgccaggagcacggctctgtccccagcctgggaaagcccctgcccctcctctccctcatcaaggacacgggcctgtccacaggcttctgagcagcgagcctgctagtggccgaaccagaaccaattattttcatccttgtcttattcccttcctgccagcccctgccattgtagcgtctttcttttttggccatctgctcctggatctccctgagatgggcttcccaagggctgccggggcagccccctcacagtattgctcacccagtgccctctcccctcagcctctcccctgcctgccctggtgacatcaggtttttcccggacttagaaaaccagctcagcactgcctgctcccatcctgtgtgttaagctctgctattaggccagcaagcggggatgtccctgggagggacatgcttagcagtccccttccctccaagaaggatttggtccgtcataacccaaggtaccatcctaggctgacacctaactcttctttcatttcttctacaactcatacactcgtatgatacttcgacactgttcttagctcaatgagcatgtttagactttaacataagctatttttctaactacaaaggtttaaatgaacaagagaagcattctcattggaaatttagcattgtagtgctttgagagagaaaggactcctgaaaaaaaacctgagatttattaaagaaaaaaatgtattttatgttatatataaatatattattacttgtaaatataaagacgttttataagcatcattatttatgtattgtgcaatgtgtataaacaagaaaaataaagaaaagatgcactttgctttaatataaatgcaaataacaaatgccaaattaaaaaagataaacacaagattggtgttttttcctatgggtgttatcacctagctgaatgtttttctaaaggagtttatgttccattaaacgatttttaaaatgtacacttgaaaaaaaaaaaaaaaaa

SEQ ID NO: 332 - DNA, 2836 bp, Homo sapiens
ctccctcagcgtccggccgaggcgcggtgtatgctgagccgctgccgcagcgggctgctccacgtcctgggccttagcttcctgctgcagacccgccggccgattctcctctgctctccacgtctcatgaagccgctggtcgtgttcgtcctcggcggccccggcgccggcaaggggacccagtgcgcccgcatcgtcgagaaatatggctacacacacctttctgcaggagagctgcttcgtgatgaaaggaagaacccagattcacagtatggtgaacttattgaaaagtacattaaagaaggaaagattgtaccagttgagataaccatcagtttattaaagagggaaatggatcagacaatggctgccaatgctcagaagaataaattcttgattgatgggtttccaagaaatcaagacaaccttcaaggatggaacaagaccatggatgggaaggcagatgtatctttcgttctcttttttgactgtaataatgagatttgtattgaacgatgtcttgagaggggaaagagtagtggtaggagtgatgacaacagagagagcttggaaaagagaattcagacctaccttcagtcaacaaagccaattattgacttatatgaagaaatggggaaagtcaagaaaatagatgcttctaaatctgttgatgaagtttttgatgaagttgtgcagatttttgacaaggaaggctaattctaaacctgaaagcatccttgaaatcatgcttgaatattgctttgatagctgctatcatgacccctttttaaggcaattctaatctttcataactacatctcaattagtggctggaaagtacatggtaaaacaaagtaaatttttttatgttctttttttggtcacaggagtagacagtgaattcaggtttaacttcaccttagttatggtgctcaccaaacgaagggtatcagctatttttttttaaattcaaaaagaatatcccttttatagtttgtgccttctgtgagcaaaactttttagtacgcgtatatatccctctagtaatcacaacattttaggatttagggatacctgcttcctctttttcttgcaagttttaaatttccaaccttaagtgaatttgtggaccaaatttcaaaggaactttttgtgtagtcagttcttgcacaatgtgtttggtaaacaaactcaaaatggattcttaggagcattttagtgtttattaaataactgaccatttgctgtagaaagatgagaaaacttaagctttgttttactacaacttgtacaaagttgtatgacagggcatattctttgcttccaagatttgggttgggggcactaggggttcagagcctggcagaattgtcagctttagtctgacataatctaagggtatggggcaaggatcacatctaatgcttgtgtccttatactctattatatagtgttattcatgattcagctgatcttaacaaaattcgtagcagtggaaccttgaaatgcatgtggctagatttatgctaaaatgattctcagttagcattttagtaacacttcaaaggtttttttttgtttgttttctagacttaataaaagcttaggattaattagaagaagcaatctagttaaatttcccatttgtattttattttcttgaatacttttttcatagttatttgtttaaaaagatttaaaaatcattgcactttggtcagaaaaataataaatatatcttataaatgtttgattcccttccttgctatttttattcagtagatttttgtttggcatcatgttgaagcaccgaaagataaatgatttttaaaaggctatagagtccaaaggaatattcttttacaccaattcttcctttaaaaatctctgaggaatttgttttcgccttacttttttttcttctgtcacaatgctaagtggtatccgaggttcttaatatgagatttaaaatcttaaaatgtttcttattttcagcacttacatcatttggtacacagggtcaaatagggcaaataattttgtctttgtataatagatttgatatttaaagtcactggaaataggacaagttaatggatgtttttatattttaatagaatcatttatttctatgtgttatgaaattcacttaatgataaatttttcaacatacttgccattagaaaacaaagtattgctaagtactataacatattggccactaaaattcatattgagattatcttggtttcttggaagagataggaatgagttcttatctagtgttgcaggccagcaaatacagaggtggtttaatcaaacagctctagtatgaagcaagagtaaagactaaggtttcgagagcattcctactcacataagtgaagaaatctgtcagataggaatctaaatatttatagtgagattgtgaaagcaaccttaaagttttgaagaagactgatgagactaggtgctttgcttcctttcatcaggtatctttctgtggcatttgagaacagaaaccaagaaacatggtaattactaaattatgaggctttgctttttgtttgcttttaagtagaaaaacatgttggcaacattgagttttggagttgattgagataatatgacttaactagttttgtcattccatttgttaaagatacagtcaccaagaatgttttgagttttttgaaagaccccaatttaagccttgcttatttttaaattatttccattcagtgatgttggatgtatatcagttatttagtaaataatctcaataaattttgtgctgtggcctttgctaaaaaaaaaaaaaaaaaaaaaaaaaaaa

SEQ ID NO: 333 - DNA, 3268 bp, Homo sapiens; identical to SEQ ID NO: 305

SEQ ID NO: 334 - DNA, 3342 bp, Homo sapiens
aatatcaacctgtttcctcctcctccttctcctcctcctccgtgacctcctcctcctctttctcctgagaaacttcgccccagcggtgcggagcgccgctgcgcagccggggagggacgcaggcaggcggcgggcagcgggaggcggcagcccggtgcggtccccgcggctctcggcggagccccgcgcccgccgcgccatggcccgaagaccccggcacagcatatatagcagtgacgaggatgatgaggactttgagatgtgtgaccatgactatgatgggctgcttcccaagtctggaaagcgtcacttggggaaaacaaggtggacccgggaagaggatgaaaaactgaagaagctggtggaacagaatggaacagatgactggaaagttattgccaattatctcccgaatcgaacagatgtgcagtgccagcaccgatggcagaaagtactaaaccctgagctcatcaagggtccttggaccaaagaagaagatcagagagtgatagagcttgtacagaaatacggtccgaaacgttggtctgttattgccaagcacttaaaggggagaattggaaaacaatgtagggagaggtggcataaccacttgaatccagaagttaagaaaacctcctggacagaagaggaagacagaattatttaccaggcacacaagagactggggaacagatgggcagaaatcgcaaagctactgcctggacgaactgataatgctatcaagaaccactggaattctacaatgcgtcggaaggtcgaacaggaaggttatctgcaggagtcttcaaaagccagccagccagcagtggccacaagcttccagaagaacagtcatttgatgggttttgctcaggctccgcctacagctcaactccctgccactggccagcccactgttaacaacgactattcctattaccacatttctgaagcacaaaatgtctccagtcatgttccataccctgtagcgttacatgtaaatatagtcaatgtccctcagccagctgccgcagccattcagagacactataatgatgaagaccctgagaaggaaaagcgaataaaggaattagaattgctcctaatgtcaaccgagaatgagctaaaaggacagcaggtgctaccaacacagaaccacacatgcagctaccccgggtggcacagcaccaccattgccgaccacaccagacctcatggagacagtgcacctgtttcctgtttgggagaacaccactccactccatctctgccagcggatcctggctccctacctgaagaaagcgcctcgccagcaaggtgcatgatcgtccaccagggcaccattctggataatgttaagaacctcttagaatttgcagaaacactccaatttatagattctttcttaaacacttccagtaaccatgaaaactcagacttggaaatgccttctttaacttccacccccctcattggtcacaaattgactgttacaacaccatttcatagagaccagactgtgaaaactcaaaaggaaaatactgtttttagaaccccagctatcaaaaggtcaatcttagaaagctctccaagaactcctacaccattcaaacatgcacttgcagctcaagaaattaaatacggtcccctgaagatgctacctcagacaccctctcatctagtagaagatctgcaggatgtgatcaaacaggaatctgatgaatctggaattgttgctgagtttcaagaaaatggaccacccttactgaagaaaatcaaacaagaggtggaatctccaactgataaatcaggaaacttcttctgctcacaccactgggaaggggacagtctgaatacccaactgttcacgcagacctcgcctgtggcagatgcaccgaatattcttacaagctccgttttaatggcaccagcatcagaagatgaagacaatgttctcaaagcatttacagtacctaaaaacaggtccctggcgagccccttgcagccttgtagcagtacctgggaacctgcatcctgtggaaagatggaggagcagatgacatcttccagtcaagctcgtaaatacgtgaatgcattctcagcccggacgctggtcatgtgagacatttccagaaaagcattatggttttcagaacacttcaagttgacttgggatatatcattcctcaacatgaaacttttcatgaatgggagaagaacctatttttgttgtggtacaacagttgagagcagcaccaagtgcatttagttgaatgaagtcttcttggatttcacccaactaaaaggatttttaaaaataaataacagtcttacctaaattattaggtaatgaattgtagccagttgttaatatcttaatgcagatttttttaaaaaaaacataaaatgatttatctgtattttaaaggatccaacagatcagtattttttcctgtgatgggttttttgaaatttgacacattaaaaggtactccagtatttcacttttctcgatcactaaacatatgcatatatttttaaaaatcagtaaaagcattactctaagtgtagacttaataccatgtgacatttaatccagattgtaaatgctcatttatggttaatgacattgaaggtacatttattgtaccaaaccattttatgagttttctgttagcttgctttaaaaattattactgtaagaaatagttttataaaaaattatatttttattcagtaatttaattttgtaaatgccaaatgaaaaacgttttttgctgctatggtcttagcctgtagacatgctgctagtatcagaggggcagtagagcttggacagaaagaaaagaaacttggtgttaggtaattgactatgcactagtatttcagactttttaattttatatatatatacattttttttccttctgcaatacatttgaaaacttgtttgggagactctgcattttttattgtggtttttttgttattgttggtttatacaagcatgcgttgcacttcttttttgggagatgtgtgttgttgatgttctatgttttgttttgagtgtagcctgactgttttataatttgggagttctgcatttgatccgcatcccctgtggtttctaagtgtatggtctcagaactgttgcatggatcctgtgtttgcaactggggagacagaaactgtggttgatagccagtcactgccttaagaacatttgatgcaagatggccagcactgaacttttgagatatgacggtgtacttactgccttgtagcaaaataaagatgtgcccttattttacctaaaaaaaaaaaaaaaaaaaaaaaaaaaaa

SEQ ID NO: 335 - DNA, 2207 bp, Homo sapiens
tccggcgccccgcgccgcctccgctgcgggtcgggagcgcgcgtctccgccgcacctcggatctaggagctactcgcccggccctgggcggtgggaggcggcggcggcggcggcgctcgcgcacctcggaggagccaggagccggaaccagggccgagcccgcgggccggggctagccagccggtcggagatgtccgcccagaggttaatttctaacagaacctcccagcaatcggcatctaattctgattacacctgggaatatgaatattatgagattggaccagtttcctttgaaggactgaaggctcataaatattccattgtgattggattttgggttggtcttgcagtcttcgtgatttttatgtttattgtgctgaccttgctgaccaagacaggagccccacaccaagacaatgcagagtcctcagagaagagattcagaatgaacagctttgtgtcagactttggaagacctctggagccagataaagtattttctcgccaaggcaacgaggagtccaggtctctctttcactgctacatcaatgaggtggaacgcttggacagagccaaagcttgtcaccagaccacagcccttgacagtgacgtccaactccaggaagccatcagaagcagtgggcagccagaggaggagctgaacaggctcatgaagtttgacatccccaactttgtgaacacagaccagaactactttggggaggatgatcttctgatttctgaaccacctattgttctggaaactaagccactttcccagacctcacacaaagacctggattgagaaacatgctctgtaaagggtcttcctgaagatgtggattctatctttatgtagcaagaaatctacatccaccaaaattgtgtgtgtttgggggagagagagacatagagatagagacagagaggcagagaagagacccctttagaagagagctgagctgattaagctgagtggttttttgttttgttttgtttttgctttttaatacatttggagctttgggagtattaaagtatttacaccaagcttgtccaacccgtggcatgtgtcccaggacagctttgaatgtggcccaatacaaattttaaactttattaaaacatgagttttgtttttttttttgctattttttttaaagctcgtcagctatcgttagtgttagtgtactttatgtgtggcccaagacaactcttcttccagtgtggcacagggaagctaaaagattggacacctctgatttatactagctcgttttgcttgttgaaaaatttggccaaatacctattgtcagcattcttgggtgaggattagcctaccatgttctaatctggccctgccactactatgctctacctttggtgagttgctttacctctctgggctgccccatttttaactgtaggttgacaggtctagagtgatccatcccacctctaatattttgtgaatttatgactttgccttcagatgaggctgagctatacataaaacagtataaactagggtactgcctcgtatctcttgtaggctctctcaaatctctgtaccttccacttaaccctaattgagccaagctttagtcaggggatctggttgtctaccagaatgtcaggagactcatcttacacagtcatggtggccaatgtttctggtgggttgtgctgaaacagctcttctgagaacttccaaccacccatgctctaacctggagacagccatcccctgcctcagaataagtaccaattcgtagtacatgtatggtactcttgtccccaagaaatgttaggaagcttgtcagctgaatgagaggaggtgccttctgggtatctctgtgttggtgtatctgtgccattggctacagaacaagaaaaatactatttgccatgctattaccttggcagatgtgtaggtgatagtcatctggctttgagctgagatggtcagtgggttgtaaattccccactagcagatattcagggtggcctgagttatgtaaacaagtgagcaacacagctttaatttcatggaggaatcaaagctgcacactggtattaaaacaacttgattttgcgcacacagttgcatgcatggcaagctgttaacctctgggtggcattttcattatgaatttgttcaccacctgtcttgcttaagctacaaaataaatgcatttgactgc

SEQ ID NO: 336 - DNA, 4642 bp, Homo sapiens
gggtcacagccacccgcgggaagctcgtggccgggaccccgaggcgggagcgcgggctgggccgggctgggctacgcgcacgggctcggccgccgcccctgccggttgcataccctgtcctgagggcgcggcacggagtgcatgcgggccgctgccatgacgaccgccatcttggagcgcctgagcaccctgtcggtcagcgggcagcagctgcgccgcctgcccaagatcctggaggatgggcttcccaagatgccttgcactgtcccagaaacggatgtgccccagctcttccgggagccttacatccgcaccggctaccgccccacggggcacgagtggcgctactacttcttcagcctctttcagaaacacaacgaggtggtcaacgtctggacccatttactggcagccctggccgtcctcttgcgattctgggcctttgccgaggctgaggccttgccatgggcgtctacccactccctgcctctgctcctcttcatcctgtcgtcaatcacttacctcacctgcagccttctggcccacctgctgcagtccaagtcagagctctcccactacaccttctactttgtggactatgttggcgtgagcgtttaccaatatggcagtgctttggctcatttcttctacagctctgaccaggcctggtatgaccggttctggcttttcttcttgccagcagctgccttctgtggctggttatcttgtgctggctgttgctatgccaaatatcgttaccggaggccttatccagtcatgaggaagatctgtcaagtggtgccagcaggtctggcttttatcctagacatcagccctgtggcacaccgtgtggcgctctgtcacctggctggctgccaggagcaagcagcctggtaccacaccctccagatcctcttcttcctggttagcgcttatttcttctcctgccccgtgcctgagaagtacttcccgggttcctgtgacatcgtgggccatgggcatcagatcttccatgcatttctgtccatctgtacgctctcccagctggaggccatcctcctggactaccaggggcggcaggagatcttcctgcagcgccatggacccctatctgtccacatggcctgcctctccttcttcttcctggctgcctgcagtgctgccaccgcagcccttctgaggcacaaagtcaaggccagactgaccaagaaagattcctgaggctggcaagtggggcaacgtgtggaggaagcccctcataatttggagaaaacttgatacaatagaagctgacttttaaggcattggcttttaaattaatacatatatccaaggatatgttatagctgcagtgtttgaaagccaaaggatttaagagttttgttgttgttaataaaaggaatactccttttccttttggatcatagcttaacaaggcacaggaagggaagggatcttgactaagattcatgagacattgaattaaggagaatcatcttcatgcctgaaaatttagcaaaattccgactatggcctccaggggcaattcctaaaagctgaatggataataaaattggactggaaagtaagtaggtggctggtcctcaccctgttggaatggctatcctactatgctgttctttggtaatggaataaattgacccaaggaccgaatttcatttggatttcaagttgtccagagtggaaaagccttcaagatgacatgatgaattactcagttcatctgatttctggtccctcctttctcgacaactataatactaacccttttctcaggataactgtctacacctggcagttttctctgaagtgctgttcactcacatccctaccttgcatggtaatataaaggactaggaagcagtcatacttccaggaaatgcttggattcatgtggacattcaggaagcttattctcatataatactaatctaaacagtactagaaattacagtgccaagagccaccaggaggcccagccaataagcatagatactatatggtatcatgggacccatctattttttaccagtggactacaggattacttgagagttatcagggctgcctaacagaccaggagatctgggggttgcaccagggaatcgccatatttgaccagcatgttttaaaagctcttggtaggattagttggttctaaggatccctctagggacctcattatttcaagaggaacccaaagtccagcctcctacatagatgctgccccacgaaggacccacaaaactaacctagttcagggttctcaggcaggcagttctgcttcagcttagagcagaacccataaaatactcaagtactgggataggcaagcatgtgtgtttactgtggattggtccctgaaggctcctttgggtgagaacatgtgaaccaggcaccctggtttgtttggagcattgctgcccagaagcttctatgggataggtggtgcttgggattgatgtgttgtggccatgcagccctccctgaggattgacttctgcactaatccagtgaaggaggctgtgtcaaaagaagggctcagaagccctcttttcagaggcaatgattcctgtcagtatgaggtcccttagttactaaaaagggacatgatttaactccagtttgatgaacctcctccgagtttactttattgtcttcaaatcttttgttttcttcctttttgtgagatttgtgggttttgtgccttataaatggaaatgtatgaacacaatatatgctcatgtagaattttctgttctgggttattgggataagaaaaaatatatattgctcttcaactagtgaatgaaagaaacttcagaaagctagaattgcttatcaatcaaaagactttctcaatctattttggccacaaacaaacatattcaactgaagctttccaataatctttatatcaagaaagcatgcgtcttgtcagctacattgttttcttagatggatttctcctgttaatcctcaaatatctgaacttctgtgttacccaagtgtcttatacaagcttctggtgtctaggacaaatttatggcaaataaaattagcaaaactgaactgggttgaactgaacaagaggatgggggaattgtgcaaatacgttgttagtagaaggtcaatttaaaatagggactagaaattatttgaagttttctttattacggattcaaagacttattttgaaagttggaaggagaagggagggaagagagcagaagggaagaaggtgtaagtcaagctcttgaatataactggtggtattgtgggcagagatctttagttcaaatccacgtattttttaaaagagagaactggaggtagagcaatgatcagatgggtgcacagaccagtgccaatctgaacattgttaatggcctgtgacatgatgagcacaggaacaggcatgaagatattgccatacaattttaatttatacaagtattggcccctcaagtggttggaaattttttttttaatctctttttctgagacagggtcttactctgtcgcccaggctggagtgcagtgatgcaatcacggctcactgcagcctcgacctccccagctcaagcaatcctcccacctcagcctcctaagtacctggtactacaggcgcgtgccaccacacctggctaatttttgcattttttgtagagacagggttttgccacgttgcttaggctggtcttgaactcctgaactcaagtgatccgcccacctcagcctcccaaagtgttgggattacagacattagccatcacgcctgccctagaaacagttttttaataggagatatttgagaggcattgaggtagaagactctatgacatgccctcagaatatcagaatcttcttagaaataaactaggaaatgcagatgtttttaactactcagacttttgaggaattaatccttttaaaacatttttgttaaagttagtgtatcagtaagaaacagacctagtttaaaaggaataatcaacaattttataaaggagatggcttattcaaccatagcccctccaacatatctactggaaattctgctggttaactttatctctctctctcttaatttagactttcaacctatgaaaatgtaaatacctttgaaaaaactaaactatcagtcatttacatcttctcatgaatgaaatgcagtgtagggagaggagatggcaggacacagcaaacaggacacatttgcctgcttctctcttgcctaattcttcctgacctgtatttactgatgcttaataatacttgtaagactctaggggttcatttcccatttcagcggaaagtacttcactcaacaacaatattctcaagagtcttctactggaagctagaaagaaataggaatttaagtccatagaatgaaggtagttattcctgcctgtgttgcccacctgttcacaaaaagtacctttatgcttgaaaacattaggttctttggttactgcactgtagtttcaaatggatcctccagatggcattcatgtcttactcagaaagggcactgccattgtccccaaggcttctgtctactaattctattggtcttgtgttttgcttgattgcttggcaaaaaaaaaaaaaaaaa

SEQ ID NO: 337 - DNA, 1880 bp, Homo sapiens
tctctgtgcgttgaagccggagaccgcggcggcctcagcgaggaccctccgccccggagccgccggccggagccgcagcctctgccgcagcgcccccgccacctgtcccctccccctccgcctccgccggagccgcctcgtgcactctggggtatggccgtcaatgtgtactccacatctgtgaccagtgaaaatctgagtcgccatgatatgcttgcatgggtcaacgactccctgcacctcaactataccaagatagaacagctttgttcaggggcagcctactgccagttcatggacatgctcttccccggctgtgtgcacttgaggaaagtgaagttccaggccaaactagagcatgaatacatccacaacttcaaggtgctgcaagcagctttcaagaagatgggtgttgacaaaatcattcctgtagagaaattagtgaaaggaaaattccaagataattttgagtttattcagtggtttaagaaattctttgacgcaaactatgatggaaaggattacaaccctctgctggcgcggcagggccaggacgtagcgccacctcctaacccaggtgatcagatcttcaacaaatccaagaaactcattggcacagcagttccacagaggacgtcccccacaggcccaaaaaacatgcagacctctggccggctgagcaatgtggcccccccctgcattctccggaagaatcctccatcagcccgaaatggcggccatgagactgatgcccaaattcttgaactcaaccaacagctggtggacttgaagctgacagtggatgggctggagaaggaacgtgacttctacttcagcaaacttcgtgacatcgagctcatctgccaggagcatgaaagtgaaaacagccctgttatctcaggcatcattggcatcctctatgccacagaggaaggattcgcaccccctgaggacgatgagattgaagagcatcaacaagaagaccaggacgagtactgagggcggccgcagccctggctgactgcacggcttccccgtgcctccctccctgctccactcccacattatagtcctttcctaacacggtcggccgggtgctttgtgtcagtgctgcagcactggggagccaggcgaggggggcttgggggcatggggccggaaagcaggcagaagcccgtcctgggtggtgctggcccagttggtgggacccctgtccacacccaccctatttatttccgttgtctctctgctgtgtcgcccaacacttcccagggtgctgctgccacccgccccagccagccacctgctcctgacagccagcagctgtgtatttgacaaagtcattggtatatttttacttactggattctccttgcactttacctgttcttttccagagctgacagcacgggctccggcgcagtgtgcctggcttggcttcccttccccatggctgggggctggggtaggactcacccattctaatttattttgtcttttggcttctcagtagctaaggggaaggctgatgtcaggagagggagagggggctgaggaggtagtgctgtaggcccagggggtcagggaaagggaggggggcatgtgagggatggaaatgacctcctggcaccaggctcacccacccaaggccccctgccccagcactgaatcccagcgctgccctgaggcccccagccactccctccagcagcctggttcaccacacaaactctgcctggaccccattgtctgtctgcttcccacctgccctccccaccccctgcccctcgggcaccagcctgcatatgtgttcacttttatttaaataaacttgtgtggtaaaagtacatgccatgtgtccctcaactgaaaaaaaaaaa

SEQ ID NO: 338 - DNA, 1641 bp, Homo sapiens
gccgccgccgccgccgccgccgccgccgccgccaggggaagggttcgggtccgggtcgggctcggcgggcgcggggtgcgggacggcccagggcacggcggctgcagcgggagcacactgagcgcccgcccgccatgtccaggaagaagacccccaagagcaaaggggccagcacccccgctgcctccacgctgcccaccgccaacggggcccgaccggcgcgctccgggactgcgctttccggccccgacgcgccgcccaacgggcccttgcagcccggccggccctcgcttggcggcggtgtcgacttctacgacgtcgccttcaaggtcatgctggtgggggactcgggtgtggggaagacctgtctgctggtgcgattcaaggatggtgctttcctggcggggaccttcatctccaccgtaggcattgacttccggaacaaagttctggacgtggatggtgtgaaggtgaagctgcagatgtgggacacagctggtcaggagcggttccgcagtgttacccatgcctactaccgggatgctcatgctctgctgctgctctacgatgtcaccaacaaggcctcctttgacaacatccaggcctggctgaccgagatccacgagtacgcccagcacgacgtggcgctcatgctgctggggaacaaggtggactctgcccatgagcgtgtggtgaagagggaggacggggagaagctggccaaggagtatggactgcccttcatggagaccagcgccaagacgggcctcaacgtggacttggccttcacagccatagcaaaggagttgaagcagcgctccatgaaggctcccagcgagccgcgcttccggctgcatgattacgttaagagggagggtcgaggggcctcctgctgccgcccttgaacctggctgagctcagtcctctggaggaagccgcccagtccctagaaggctggacagagggtctccaggcccttctgactttgttgcccagtggccaacgcccgagtgtctgttttcaggagccccaggtcaagccttgtcccttcctcctcccagcaacagtcccaacaagcaggcttctgagagcccgtggccgcacactggccgccacggaaaagcagtcttctgcacgggacggggagcggcaagtggacagactttgccacggtgctctgctgccccctcctgggcacgtccaggtgagggagggctggggctggcaccacgcacagtgcctaaccctagaaaagccatgtcttcagccgcacatgctcaggcagctaagggaggacgcctgcccacgcctgggacagaaggcttcactgctaatcacatcgtgcatctgtgtgtcctgggagctgcctgctcccggcccaccctctaggaggctctggctcaaacagcaatagggtcttcctcactgaccttggaggatgcctgtggccttgtgataaaatgtgggaaatcacagaaaacaccagaaacaacaactgccagcccggcctggccacaggtgaggtctgtgatttccgagcacgctccaccttgcactcaacttggccttttgattgcacaagcctttgttttcagtcctagtgaataaagttgtgttttctggaaaaaaaaaaaaaaaaaa

SEQ ID NO: 339 - DNA, 8500 bp, Homo sapiens
cgtcatggccgtcagcaccgcgttcccgtcctcttccgcttggccccagaaagtttcggttctgcccggcggtggacccacgagcgcgtgccaccatggagtctgaccactgctgagcagacagccaccgagggccgaaattctgagccttcctctggacccaggcaggagacatacagacaagaaaggcaaactcaccatggcctccaccaatgcagagagccagctccagagaatcatccgagacttgcaagatgctgtgacagaactaagcaaagaatttcaggaagcaggggaacccatcacggatgacagcaccagcttgcataaattttcttataaacttgagtatctcctgcaatttgatcagaaagagaaggccaccctcctgggcaacaagaaggactactgggattacttctgtgcctgcctggccaaggtgaaaggagccaatgatgggatccgatttgtcaagtctatctcagagctccgaacatccttggggaaaggaagagcatttattcgctactccttggtgcaccagaggttggcagacaccttacagcagtgcttcatgaacaccaaagtgaccagtgactggtactatgcaagaagcccctttctgcagccaaagctgagctcggacattgtgggccaactctatgagctgactgaggttcagtttgacctggcgtcgaggggctttgacttggatgctgcctggccaacatttgccaggaggacgctgaccactggctcttctgcttacctgtggaaaccccctagccgcagctccagcatgagcagcttggtgagcagctacctgcagactcaagagatggtgtccaactttgacctgaacagccccctaaacaacgaggcattggagggctttgatgagatgcgactagagctggaccagttggaggtgcgggagaagcagctacaggagcgcatgcagcagctggacagagagaaccaggagctgagggcagctgtcagccagcaaggggagcaactgcagacagagagggagagggggcgcactgcagcggaggacaacgttcgcctcacttgcttggtagctgagctccagaagcagtgggaggtcacccaggccacccagaacactgtgaaggagctgcagacatgcctgcaggccctggagctaggagcagcagagaaggaggaggactaccacacagccctgcggcggctggagtccatgctgcagcccttggcacaggagcttgaggccacacgggactcactggacaagaaaaaccagcatttagccagcttcccaggctggctagccatggctcagcagaaggcagattcggcatcagacacaaagggccggcaagaacctattcccagtgatgcggcccaggagatgcaggagctaggggagaagcttcaagccctagaaagggagagaaccaaggtcgaggaggtcaacagacagcagagtgcccaactggaacagctggtcaaggagcttcagctgaaagaggatgcccgggccagcctggagcgcctggtgaaggagatggccccactccaggaggagttgtctgggaagggacaggaggcagaccagctctggcgacggctgcaggagttgctggcccacacgagctcctgggaggaggagctagcagagttgaggcgggagaaaaaacagcaacaggaggagaaggagctgctggagcaggaggtcaggtctctgacccggcagctgcagttcctggagacccagctggcacaggtgagccaacatgtgagtgacctggaggagcagaagaagcagctcattcaggacaaagaccacctcagccagcaggtgggtatgctcgagcggcttgctgggccgcctggcccagaactgccagtggcaggtgagaagaatgaggccctggtccctgtgaactccagtctgcaagaggcctgggggaagccagaggaggagcagaggggcctgcaggaggcacagttagacgataccaaggtgcaagagggcagccaggaggaagagctccggcaggccaacagggagctggagaaggagctacagaatgtggtcgggcgtaaccagctcctggagggcaagctgcaagccctgcaggccgattaccaggctttgcagcagcgggaatcagccatccagggctccttggcctccctggaggccgagcaggccagcatccggcacttgggtgaccagatggaggcgagcttgctggctgtaaggaaggccaaggaggccatgaaagcccagatggcagagaaggaggccattctacagagcaaggagggcgagtgtcagcagctgcgggaggaggtggagcagtgccagcaactggcagaagcccggcacagagagcttagggctctcgagagccagtgccagcagcagacccagctgattgaggtcctcacagcagagaaaggccaacagggagttggcccacccactgacaatgaagcccgtgagctggctgcccagctagccctgtctcaggcgcagctggaagtccatcagggggaggtccaacggctgcaggctcaggtggtggacctccaggccaagatgcgggcagccctggatgaccaggacaaggtgcagagccagctaagcatggctgaggccgtcctgagggagcacaaaacccttgtgcagcagctgaaggagcagaatgaagcccttaacagagcccatgtccaggagctgctgcaatgctcggagcgtgaaggggcactgcaggaggagagggccgatgaggcccagcagagggaggaggagctgcgggccctgcaggaggagctgtcccaggccaaatgcagctccgaggaagcacagctggagcacgctgagctgcaagagcagctgcaccgggccaacacagacacagctgagctgggcatccaggtttgcgcactgaccgtggaaaaggagcgagtggaggaggcactggcctgtgctgtccaggagctccaggacgccaaagaggcagcctcaagggagcgagagggcctggagcgccaagtagctgggctgcagcaagagaaggagagcttgcaggagaagctgaaggcggccaaggcagcagccggctcactgcctggcctgcaggcccagctcgcccaggcagagcagcgggcccagagcctccaagaggctgcacaccaggagctcaacaccctcaagttccagctgagtgctgaaatcatggactaccagagcagacttaagaatgctggtgaagagtgcaagagcctcaggggccagcttgaggagcaaggccggcagctgcaggctgctgaggaagctgtggagaagctgaaggccacccaagcagacatgggagagaagctgagctgcactagcaaccatcttgcagagtgccaggcggccatgctgaggaaggacaaggagggggctgccctgcgtgaagacctagaaaggacccagaaggaactcgaaaaagccacaacaaaaatccaagagtattacaacaaactctgccaggaggtgacaaatcgtgagaggaatgaccagaagatgcttgctgacctggatgacctcaacagaaccaagaagtatctcgaggagcggctgatagagctgctcagggacaaggatgctctctggcagaagtcagatgccctggaattccagcagaagctcagtgctgaggagagatggctcggagacacagaggcaaaccactgcctcgactgtaagcgggagttcagctggatggtgcggcggcaccactgcaggatatgtggccgcatcttctgttactactgctgcaacaactacgtcctgagcaagcacggtggcaaaaaggagcgctgctgccgagcctgtttccagaagctcagtgaaggccctggctcccctgatagcagtggctcaggcactagccagggagagcccagccctgcactgtcaccagcctcacctgggccccaggccacaggaggccaaggagcaaatacagactacaggccaccggacgacgctgtgtttgatatcatcacagatgaggaattgtgccagatacaggagtccggctcctctttgcctgaaacacccactgaaactgattctcttgacccaaatgcggctgaacaggatactacatcaacctcgctaacgcctgaggacactgaagacatgcccgtggggcaggattcggaaatctgcctgctgaagtctggagaactgatgatcaaagtacccctcacagtggatgagatcgccagcttcggggagggtagcagggagctgtttgtgaggtccagcacctacagcctgatccccatcactgtgcccgaggcagccctcaccatcagctgggtcttctcctctgaccccaagagcatctccttcagtgtggtcttccaggaggccgaggacacaccgctggatcagtgtaaggtcctcattcccacgacccgatgcaactcccacaaggagaacatccagggccagctcaaggttcgcacacccggcatctacatgctcatcttcgacaataccttctcaaggtttgtctctaaaaaggtattttatcacttgacggttgatcggcctgtgatctacgatggaagtgatttcctgtagcttcagcacctcagtaacttcacttcatccacaggaaacactgctcttcctcacctgtcacataaagcatttttttaaaaagtcagctgctccaaaatcatcaactcagcccctgggctgcccctcagaggcggtgtctggggaggactttgtgctcagcactctgcaccggccactcttagcccccgaggcgttgaagggctcaggcaatgtttccattaagtagagactcagctgttgtcacacccaaagggatgctctgccaaaggtttaaacacccaggagaccatcagcctctcctgggagcacagttgactacaggcctcttgtggagagtttcacgggcaggggtgattccaacttctgcctgtggagagattttctgccctgccccaccagggccctgcatgttggagactgagctgggtgcactggccataccctgtgaatcctcgggctgtgacgccctcaggtactcctgggaaaaggaggtacacagccatcatgcgagtcggtgccaggggaccccccggagatcctgaccagctcctccagtcatgctcttgtccctcactgccccagtaagctggaggctgctccagaactcagcagtgttggaggggcctctaagctgcactctctttctggcccttttgtctggctgattctgtcctcaaataaagcccttcactcagccagacctctccacagctcaaagcattgccctaagaatcagaagtaaagataatccaagagcaaaacccactgtacttggggcctgcaatggctgtgtgtacactacatctaatgcccaaatgccagccagtgtggatgttgtgaccacagagcaggattgtgcattggctttagagctactcctcagctgatggcccacttttgtttatataaataagagcttctgccccacctgcagacatgtttactaatgatcatagccaggattagaaccactttcaaacattggggccttcttaacaaaagtctttgataacttaagaaccaaagtaacagagtaaacagaggcatgatggatccctgggccccactcccctcctgacaggttccccaacagcccatttgcccacttcccactgctcagcccacaccagacctccaggagacatccccccttgaggcagagagatcctgttccctattcccagacaagaattatttaatcttccctgttctctgtggtccttttcttccccaacaacagatagctcaccttggacagctcttcgtcccttgttcatggaaccagctgcctgcagtcaggccccaggttcttccatgggtgaacagagcatctgacaaaaggtcccagtttggccaggggtgagggagagagcaccagacaggctatccgagaatctgagagctgggcccggcaattcctccagctacccttgtgacctaagtccagtcacacatttcccaaagtttctctttgtcataaccctggtctggctggttttgagggcttgagaatgggtcagggactccaggccaagtccaacagagaccccaaacccaccacacaccagcagccacaacctcaccaccaacaaagaggacttttgtggggccacaagtaagaggtcatttctggaatggactcagacctttaaacaggagagttgagcacttccagtcagtttttaagcaaggcatggggaacagggaatagaacctttcaaagaggttgcccagagaaaagctgggcctcttgcattcggcttccttggagcagcctcttctggcagaaagccatcaggtgctcaatcatcttctcctggccaaggctctgaccatgcttagtactggaatagaggtggccaggcccccagcgactcttcttggcctgatgtttgtcctcacaggcatgccacgtggcctgagatgattcagaacaaatcatgctaactttgaatccatccagccacttgcaaatgataatcagaagtcagcttgttcactgttagaaagaaactaacaaaagagaacccagagcaatctagaatctttgagtgcttggctttccaaggatactgcggagactctggccaagctgatgaccttctgaagtgtcactggcaccatatgcaacaagaaccaccattcactgagtagctaatgggtttggggcctgggacattccatctgaggtccttcctgaacatgtcactccacagcagaggaccggttgcagcttacccagaaccactcctccaggagagctggatgttttgcgtgcaacaccttgagcactgactgctattgttcaaaaaaagcctttgctgcattcggaggactgccccgtgccctgaggtgacttcctaactatgtggtttcattagcgaatttattttttgggctgggtggacatttgtattttgttaggttgctgtttaagctcaagtttgctgtgctctctgcagctacaaaacatcttggcatatttaagagtggcttttataaatagctttattctgatattaatcagattcccaactttactgagaattaaggactggggtactttaaagaaatgcaaatagcaattgaagaaccactgctgcaggtggtagccctggctagactgaattacactagaaatcagccagaaggaagcgtccttgggatcccagatcactcttttttttttttttttttaaaaggggcagccccttgatggctcatctctctgaataacagttacgtcttcatatcgataccagatgccttcttcatcatgccactgaagccactcaccaccttcaagaacatgccaacctctgtcagattcacttacccacaaacaaggaggcacgtttggcacaaagtgttgtcctccaggtccaagtggactctacagagtgcttgacctcaacacactggattccaggtggactggaccaagagcaggcaaagacacgggaactgaaaaactccacagggtttggagaatagaaatgaaaagccacgtcatataactcaagaataaatggtgttttggaaattttaaaattatcatcgaaggtggtgaaactatttcaggcccaaatgaaaggaaatcgccagttggggatgaaatcacagagcctgtgttttatgatatggttggatgtccactgatgaaattttaaaggagtttcatttttaaaagtgcgcatgattctacatatgagaattctttaggccaagaaactgtccttggctcagaggtgttgggaattaaagcagagagaagccattcgtgatgcttagaaccaaggatggtcatgtacacaaagaccatcgagacggccattcttgtttacaaaacacttaccaagaaagcactttgtaggggaactttagtaagttcttctcatttcattatgtttcttccaaggaaacaggagagactgaattaataattctctctttcctcttaagcacttttaaaataataaagtacatcttgaaatttggggaggcatctctgatttaaaaaaagaaaaaggctgcttgatgtatgttatgcagagacactctgcctctggtggctgcagagcaatacccaagcctcatttggaaggctcaacatttggaattgcactttaattgattaatcctcaattcatgtggccttacgggatggtgggtctgggaccccaattcattcttatctgccaaagaattatctagaagcacatcaaataccagcaccccacctgcacaatgggggtggaaaacttttgtatccctaagcatattattttatagtgtctgccatgccatgtggaaatactttatttttaacctcaggatttaaataaagtaaacactatgacattt

SEQ ID NO: 340 - DNA, 3760 bp, Homo sapiens
gctctgcctgcttcgtggcgcttggttcgtccctcgcccgaggagcgcggtggcggcgtgggagggagcctctgacggcgtctggaactctattttaagaacctctcaaaacgaaacaagcaaatcatggagaagaatggaaataaccgaaagctgcgggtttgtgttgctacttgtaaccgtgcagattattctaaacttgccccgatcatgtttggcattaaaaccgaacctgagttctttgaacttgatgttgtggtacttggctctcacctgatagatgactatggaaatacatatcgaatgattgaacaagatgactttgacattaacaccaggctacacacaattgtgaggggagaagatgaggcagccatggtggagtcagtaggcctggccctagtgaagctgccagatgtccttaatcgcctgaagcctgatatcatgattgttcatggagacaggtttgatgccctggctctggccacatctgctgccttgatgaacatccgaatccttcacattgaaggtggggaagtcagtgggaccattgatgactctatcagacatgccataacaaaactggctcattatcatgtgtgctgcacccgcagtgcagagcagcacctgatatccatgtgtgaggaccatgatcgcatccttttggcaggctgcccttcctatgacaaacttctctcagccaagaacaaagactacatgagcatcattcgcatgtggctaggtgatgatgtaaaatctaaagattacattgttgcactacagcaccctgtgaccactgacattaagcattccataaaaatgtttgaattaacattggatgcacttatctcatttaacaagcggaccctagtcctgtttccaaatattgacgcagggagcaaagagatggttcgagtgatgcggaagaagggcattgagcatcatcccaactttcgtgcagttaaacacgtcccatttgaccagtttatacagttggttgcccatgctggctgtatgattgggaacagcagctgtggggttcgagaagttggagcttttggaacacctgtgatcaacctgggaacacgtcagattggaagagaaacaggggagaatgttcttcatgtccgggatgctgacacccaagacaaaatattgcaagcactgcaccttcagtttggtaaacagtacccttgttcaaagatatatggggatggaaatgctgttccaaggattttgaagtttctcaaatctatcgatcttcaagagccactgcaaaagaaattctgctttcctcctgtgaaggagaatatctctcaagatattgaccatattcttgaaactctaagtgccttggccgttgatcttggcgggacgaacctccgagttgcaatagtcagcatgaagggtgaaatagttaagaagtatactcagttcaatcctaaaacctatgaagagaggattaatttaatcctacagatgtgtgtggaagctgcagcagaagctgtaaaactgaactgcagaattttgggagtaggcatttccacaggtggccgtgtaaatcctcgggaaggaattgtgctgcattcaaccaaactgatccaagagtggaactctgtggaccttaggacccccctttctgacactttgcatctccctgtgtgggtagacaatgatggcaactgtgctgccctggcggaaaggaaatttggccaaggaaagggactggaaaactttgttacacttatcacaggcacaggaatcggtggtggaattatccatcagcatgaattgatccacggaagctccttctgtgctgcagaactgggccaccttgttgtgtctctggatgggcctgattgttcctgtggaagccatgggtgcattgaagcatacgcctctggaatggccttgcagagggaggcaaaaaagctccatgatgaggacctgctcttggtggaagggatgtcagtgccaaaagatgaggctgtgggtgcgctccatctcatccaagctgcgaaacttggcaatgcgaaggcccagagcatcctaagaacagctggaacagctttgggtcttggggttgtgaacatcctccataccatgaatccctcccttgtgatcctctccggagtcctggccagtcactatatccacattgtcaaagacgtcattcgccagcaggccttgtcctccgtgcaggacgtggatgtggtggtttcggatttggttgaccccgccctgctgggtgctgccagcatggttctggactacacaacacgcaggatctactagacctccaggaacagacatggaccttctctccagagctcctgagtggaatcaagttcttgtctttaggatgaccgtttcttaacaatcaaatctggtattgaactgcaggtgactttggcagagaaatgttttcacttttggtctcctcttccagagtcacctttccccactcctatttttgtagatgctattctttctgatgtcttcttactaggggtcattttagctcaaaccctgtaagttacagtcacaattttctgtgccaaagcagctacaataatagagaggaagccttcttagaactctgcttactaatgtattaataccactgagaccttcaggccttcgctgggatatcacttcatcctgaagtttgcattaataatccttccaggccgggcacagtggctcacgcctgtaatcccagcactttgggaggccgaggcgggcggatcacgaggtcaggagatcgagaccgccctggctaacatggtgaaacatggtgaaaccccgtctctactaaaaatacaaaaaattagctgggtgtggtggcgggtcccagctactcgggaggctgaggcaggagaatggcatgaaccccaggctggagtgcagtggctcaatgcaacctctgccccccaagttcaagtgattctcctgcctcagcctcttgagtagctgggattacaggcacatgcaccacgcccggctgatttttttttgtatttttagtagacagggtttcaccatgttggccaggctggtcttgaactcctgacctcaggtgatccgcccgcctctgcctcccaaagtgctgggattacaggtgtaagccatcacacctggccctagtgacaggtttttatgggtacttttagatgatctaagaaatcatgtgcatatatctttcagatttctattttgggaaaatgaaggtttctacaacatattgtttcagtgttcaaataaactgaaggactcaacattacatttgaactatatccttcctagtgggttagtgtgaaaaagagtttggctgattcctaaaactctgccagccctgcagtaatctccagggcctggttattgttcagacattccatggtgattcctgggaaggaagcttggctgctcagtttctgagtctggggtgagataatgttctgggaagggacatctgttctttggtgtaatctctcatggtgaaatctgctctgtacatcagacaattgcattgctaccaagtttcataccaaatatttgaaaggatggtattgaatctaaaaccaaatattagtttttattaaactcatgggaaggctaatatattccaacgtaaattattacatatggttaagtaattgcatgttaatttattttaatgtaaatatttttgttactgttctgagccaaattctaaagaaaaaataaatacatttccttgttgaaaaaaaaaaaaaaaaaa

SEQ ID NO: 341 - DNA, 4098 bp, Homo sapiens
gcggccgctgggctcaggctgtccgctctgggctccgcggcctcggccccgctgcactccacctccgccccctcggactccctcccctctgcttctactcctcctgctccagtgcggatcgtttcgcaactgcttgccactcgtcccgtgcctggctgtttttccatttcccggccccctcttcttgagtactttaccccctgcatttggggacagggactggaaaaggggcgggtggagcgtccagtggagaagaaggaagcgaggcccgcaggaggaggaggatcggcggactgtggggaggagaccccacgccaccctttctggtcatctcccctcccgccccgcccctgcgcacactccctcgcgggcgagctactttcggaccaggaaagtaagagcggccctgggtgacagcgccgcggggccagtcccggggttagccgcgcgtctgctcgcttctggtccgtcgcgctcccagccagggcacagcccggaccgaggatggcttcgaccacaacctgcaccaggttcacggacgagtatcagcttttcgaggagcttggaaagggggcattctcagtggtgagaagatgtatgaaaattcctactggacaagaatatgctgccaaaattatcaacaccaaaaagctttctgctagggatcatcagaaactagaaagagaagctagaatctgccgtcttttgaagcaccctaatattgtgcgacttcatgatagcatatcagaagagggctttcactacttggtgtttgatttagttactggaggtgaactgtttgaagacatagtggcaagagaatactacagtgaagctgatgccagtcattgtatacagcagattctagaaagtgttaatcattgtcacctaaatggcatagttcacagggacctgaagcctgagaatttgcttttagctagcaaatccaagggagcagctgtgaaattggcagactttggcttagccatagaagttcaaggggaccagcaggcgtggtttggttttgctggcacacctggatatctttctccagaagttttacgtaaagatccttatggaaagccagtggatatgtgggcatgtggtgtcattctctatattctacttgtggggtatccacccttctgggatgaagaccaacacagactctatcagcagatcaaggctggagcttatgattttccatcaccagaatgggacacggtgactcctgaagccaaagacctcatcaataaaatgcttactatcaaccctgccaaacgcatcacagcctcagaggcactgaagcacccatggatctgtcaacgttctactgttgcttccatgatgcacagacaggagactgtagactgcttgaagaaatttaatgctagaagaaaactaaagggtgccatcttgacaactatgctggctacaaggaatttctcagcagccaagagtttgttgaagaaaccagatggagtaaaggagtcaactgagagttcaaatacaacaattgaggatgaagatgtgaaagcacgaaagcaagagattatcaaagtcactgaacaactgatcgaagctatcaacaatggggactttgaagcctacacaaaaatctgtgacccaggccttactgcttttgaacctgaagctttgggtaatttagtggaagggatggattttcaccgattctactttgaaaatgctttgtccaaaagcaataaaccaatccacactattattctaaaccctcatgtacatctggtaggggatgatgccgcctgcatagcatatattaggctcacacagtacatggatggcagtggaatgccaaagacaatgcagtcagaagagactcgtgtgtggcaccgccgggatggaaagtggcagaatgttcattttcatcgctcggggtcaccaacagtacccatcaagtaaatatttccaggctgtcagcttctttgttaatacacccatgctaaatttcaacagtgccacttctgcattctctgttctcaaggcacctggatggtgaccctgggccgtcctctcctcctcttcatgcatgtttctgagtgcatgaagttgtgaaggtcctacatgtaatgcatatgtgatgcatcatcttatcatatattccttcctatacattgtttacacttcaactacggggatgttccacacaaacttaaattactgttggcaaaacaatagggggagattagacaaaaaaaaaaatccacaatattccaagtacaactcttcatcaagtttctctgttaatgccaagatttaacagacttaagaactattgttctctgaatgacagttgtaagagaaatgtaaattttttagaactctttgctgttaatctgttttggtttgtttggtttttttttttttttttaaggtaaaaaaaaaatacaccttcagtttcctggtgtgatcctggttaaaatggatgatttttcattgaaagttttgctgattaacaattaaagtgggatgatatgtgggcaaaatcacttatgaaagtagaagcaagaatcagttggtttgctaccacataaagccatgctgtttttggtcaaactgtgtaaactggaaaaattcacatcatttctgagtttaatcactttaggatatattcacattgttttggtgaatttgctgaattgaattgtttttctttctcaaatctgtgatctcttttctttatcctgtttctttgttcctttcgtttgctttcttatttttcttttgttccattcttttcttacttttttcccttttccttttttggggaggctggctagtagtgtgtgagaaaagaatagaagtgaaatttgcataatgaatgtaaaagggaaataaaagtcttttgaaggtagctatactagcacttttgatcatcttcagggcccacaaaaatgttgtcaagattttaaaggtttataattctgcttaagctctagtttggacttaggtatcctaactatgttggaggtatttgcattgtttaaagttaggataaaagcaagttcctcctgtgactgcaacgtcttactgattgggacagttgccaggaggataccaacttgatagcagagggggttttatgcaaacgcactcacctccgccttggggaatgaaagggtcacttctgcatcatcactagctagttttctagtgttagagaggcttacaaatgtttgccattctcataagtgttttgaacttgatctttgtgacttgtgcttttttagcttctctcttgaatcagagtatcattgtcttcctccaaggagttagaatttcccagtttaaaacaaaaagggaaatgtcctaggttttctttgtgcttctcatttttcctttgttgattcaattcctgtgatttttgttctcttccctgaagtgctttacagtgcatggaatctccatcattgttattttaacgatagtaattcacagtcctcagaagcctatttttaaagcagaagcaaaaaagaaaaacaaaataacaaaaacaacccttcctcttttctctcatctcacctctctgtgttgattactaatcatcttagatattattgctagtggatgtatggtagatgggttgaagcttttctgataattattacacaatttaaaacaacatatatatttaaaataaatatatacagtaaatatattgagccatgttaacctgccaatgagatctgtgaaaaaataatggcctcatttttctctttttaatttcttttacccttttgtgaagcagctatacgtggcatacatgtatttaaagaaaaaaaaatagatgtagagtgttttttttacacttttaacttagcatgtggtgttgaagtattactgtagatcaagtttgtcttccgcactaagatgtgaggaaattgtgatttgttctctccaccacaaatgaattacacatttattatcttctatcattttgaaacactgcagtttaccatgggacactgtatatatttcttgccataatggtaaaggactgattgatatatttaagagttaataaatttgtgatttctgctgaaaaaaaaaaaaaaaaaa

SEQ ID NO: 342 - DNA, 4156 bp, Homo sapiens
gagaatgtgagaaaagggggaaaatgcccaggaggaagcaggagcagcccaagcgccttccctcacatgttagtaggcaggaagaggcggagggggagctcagtgaaggagaacactggtatggaaactcttcagaggctccgtcagaagcatcctatggggaagtccaggagaactataagttgtctctggaggaccggatccaggagcagtccacgtccccggacacctccttgggaagcacgactcccagcagccacacgttggagctggtggcactggacagtgaggtcctgcgagactcactgcagtgtcaagatcacctttccccgggagtgtcttctttgtgtgacgatgacccaggctccaacaagcccctgagcagcaatttgaggcggctgctggaggctggttccctcaaactcgatgctgcagccacggctaatggcagagtggagtcccccgtaaacgttggctcgaacctctccttttccccgccttcccaccacgcccggcagctcagtgttctggccaggaagttggccgagaagcaggaacagaatgaccaatacactccaagtaaccgttttatatggaatcaaggtaagtggttgccaaactcaaccaccacctgcagcttgtctccggattcagccatcctaaaactgaaagctgcagccaatgccgttctgcaggacaaatctctcaccaggactgaggagaccatgcgatttgagtccctttcctccccttttagctcccagtctgccagttctaccttggccgctttgtccaagaaggtcagtgaaagaagtttgactcctggtcaggagcaccctccaccggccagctccttcctttccctggcttctatgacctcctcagcggcccttctgaaggaggtggccgcaagggctgcgggcagtcttctggctgagaaatcatcgctgctgcctgaggaccctctaccgcccccgccttcagagaagaaaccagaaaaagtcactccgccacctccaccgccacctccaccacctccaccaccaccaccacaatccctggaattattattactcccagttcctaagggaagagtttctaaaccctccaattcagcctcagaagaggaaagtggaaagcctttccagtgtccaatatgtggtttggttattaaaaggaagagttactggaagcggcacatggtgattcacacaggtttaaaaagtcatcagtgtccgctctgtccattccggtgtgctcgcaaggacaatctcaaatcccacatgaaggttcatcagcaccaggatcggggagagacctttcagtgccagctgtgcccttttacttcctcacgccacttcagcctgaaactccacatgcgttgccatcagcacttcctgaggacagaagccaaggtgaaggaggagatcccagacccagatgtcaagggatctccccacctcagtgacagtgcctgcctggggcagcaaagggaaggaggagggacagagctagtggggaccatgatgacgtctaacactccagagaggactagccagggaggggctggcgtctcgcctttgctggtgaaggaggaacccaaggaagataacggcctgcccacctcctttactttgaatgctgccgacaggcccgccaaccacacaaagctgaaagacccctccgagtatgtggccaacagtgcgtcagcattgttcagccaggacatctctgttaagatggcgtctgattttctcatgaagctgtcagctgcaaatcagaaggagcccatgaatcttaattttaaagtgaaagaggagcctaaggaaggggagtccctaagcacgactttgcctcggtccagctatgtgttcagcccggaatctgaagtgtcagccccaggcgtctctgaggacgcactaaagccccaggaagggaagggaagtgtgctaaggcgggatgtgtcagtcaaagcagcctctgaacttctcatgaaactctcagcggaaagctacaaggaaacacagatggtgaagattaaagaggaacccatggaggttgacatccaggactcccatgtctcgatatcacccagccggaatgttggctacagcactttaatcgggcgagagaaaaccgaacccttacagaagatgccagagggcagagtacccccagagagaaacctcttcagtcaggatatctctgtgaaaatggcttccgagctcctctttcaactgtcagaaaaagtgagcaaagagcacaatcatacaaaagaaaacaccatccggaccacgaccagccctttcttttcagaagacacatttagacaatcaccattcacctccaattcaaaagaactgctgcccagtgactccgtgctgcacggaagaatatcagctccagaaacagaaaagatagtcctagaggcaggaaatggattaccatcctggaaattcaatgaccagctttttccctgtgacgtgtgtgggaaagtgtttggccgacagcagacattgtcccgacacctctcgctgcacacagaggaaagaaaatacaaatgccacttgtgcccctatgctgctaagtgccgtgcaaatctgaaccagcacttgaccgtccattccgtgaagctggtgagtacagacaccgaggacattgtcagcgccgtcacctctgaaggcagtgatgggaagaaacatccttattattacagttgtcacgtgtgtggatttgggaccgagctcaatgtccagtttgtcagccacatgtcactccacgtggacaaggagcagtggatgttttcgatctgctgcactgcctgcgacttcgtcaccatggaggaagcagagataaagactcacattggcaccaagcacacaggggaagacaggaagacccccagcgaatcaaatagcccctcttcatcctccctctcagctctgagtgattcagccaacagcaaagatgattcagatggctcccagaaaaacaagggcgggaacaatctgctggtcatctctgtcatgcctgggagccagccctcactgaacagtgaggaaaagccagagaaagggttcgaatgtgttttttgcaactttgtctgcaagacgaagaacatgtttgagcgtcatctgcagatacacctcatcacccggatgtttgagtgtgatgtgtgccacaagttcatgaagacccccgaacagctgctggagcataagaaatgccacactgtccccaccggtgggctcaagtaaggaaactcaggacagtggtgagtttcagactcctctaggtgcccattctgcatttattccaccaaccgccccgctgccatggagtgccacctcaagacccactacaagatggagtacaagtgccggatctgccagacggtgaaggccaaccagctggagctggagacgcacacccgggagcaccgcctgggcaaccactacaagtgcgaccagtgcggctacctgtccaagaccgccaacaagctcatcgagcacgtgcgcgtccacaccggggagcggcccttccactgtgaccagtgcagctacagctgcaagcgcaaggacaatctcaacctgcacaagaagctgaagcacgccccacgccagaccttcagctgcgaagagtgcctgttcaagaccacacaccctttcgtcttcagccgccacgtcaagaagcaccagagtggggactgccccgaggaggacaagaagggcctgtgtccagcccccaaggaaccggccggcccgggggccccgctcctggtggtcgggagctcccggaatctcctgtctcccctgtcagttatgtctgcctcccaggctctgcagaccgtggccctgtcggcagcccacggcagcagctcagagcccaacctggcactcaaggctttggccttcaacggctcccctttgcgctttgacaagtaccggaactcagattttgcccatctcattcccttgacaatgttataccccaagaaccacttggatctcacattccaccctccccgacctcagactgcgcctcccagcatcccctcacccaaacactccttcctggcctatctcggactgagagaaagagcagagactgtctgagggcagccatgttctgtaccaaaaacagagagacaaaagac

SEQ ID NO: 343 - DNA, 4131 bp, Homo sapiens
ggtgcgcgccgcggcttgggggagagttgagcgcttttcccccctcttttttttttttttcctcttcttcttaaacaaaccacaaacggatgtgagggaaggaaggtgtttcttttactcctgagcccagacacctcactctgttccgtctaagcttgttttgctgaacacttttttttaaaaaaggaaaaagaaaaggagttgcttgatgtgagagtgaaatggacgtaagattttatccacctccagcccagcccgccgctgcgcccgacgctccctgtctgggaccttctccctgcctggacccctactattgcaacaagtttgacggtgagaacatgtatatgagcatgacagagccgagccaggactatgtgccagccagccagtcctaccctggtccaagcctggaaagtgaagacttcaacattccaccaattactcctccttccctcccagaccactcgctggtgcacctgaatgaagttgagtctggttaccattctctgtgtcaccccatgaaccataatggcctgctaccatttcatccacaaaacatggacctccctgaaatcacagtctccaatatgctgggccaggatggaacactgctttctaattccatttctgtgatgccagatatacgaaacccagaaggaactcagtacagttcccatcctcagatggcagccatgagaccaaggggccagcctgcagacatcaggcagcagccaggaatgatgccacatggccagctgactaccattaaccagtcacagctaagtgctcaacttggtttgaatatgggaggaagcaatgttccccacaactcaccatctccacctggaagcaagtctgcaactccttcaccatccagttcagtgcatgaagatgaaggcgatgatacctctaagatcaatggtggagagaagcggcctgcctctgatatggggaaaaaaccaaaaactcccaaaaagaagaagaagaaggatcccaatgagccccagaagcctgtgtctgcctatgcgttattctttcgtgatactcaggccgccatcaagggccaaaatccaaacgctacctttggcgaagtctctaaaattgtggcttcaatgtgggacggtttaggagaagagcaaaaacaggtctataaaaagaaaaccgaggctgcgaagaaggagtacctgaagcaactcgcagcatacagagccagccttgtatccaagagctacagtgaacctgttgacgtgaagacatctcaacctcctcagctgatcaattcgaagccgtcggtgttccatgggcccagccaggcccactcggccctgtacctaagttcccactatcaccaacaaccgggaatgaatcctcacctaactgccatgcatcctagtctccccaggaacatagcccccaagccgaataaccaaatgccagtgactgtctctatagcaaacatggctgtgtcccctcctcctcccctccagatcagcccgcctcttcaccagcatctcaacatgcagcagcaccagccgctcaccatgcagcagccccttgggaaccagctccccatgcaggtccagtctgccttacactcacccaccatgcagcaaggatttactcttcaacccgactatcagactattatcaatcctacatctacagctgcacaagttgtcacccaggcaatggagtatgtgcgttcggggtgcagaaatcctcccccacaaccggtggactggaataacgactactgcagtagtgggggcatgcagagggacaaagcactgtaccttacttgagaatctgaacacctcttctttccactgaggaattcagggaagtgttttcaccatggattgctttgtacagtcaaggcagttctccattttattagaaaatacaagttgctaagcacttaggaccatttgagcttgtgggtcacccactctggaagaaatagtcatgcttctttattatttttttaatcctttatggacattgtttttcttcttccctgaaggaaatttggaccattcagattttatgttggttttttgctgtgaagtgctgcgctctagtaactgccttagcaactgtagatgtctcggataaaagtcctggattttccattggttttcataatgggtgtttatatgaaactactaaagactttttaaatggcttgatgtagcagtcatagcaagtttgtaaatagcatctatgttacactctcctagagtataaaatgtgaatgtttttgtagctaaattgtaattgaaactggctcattccagtttattgatttcacaataggggttaaattggcaaacattcatatttttacttcatttttaaaacaactgactgatagttctatattttcaaaatatttgaaaataaaaagtattcccaagtgattttaatttaaaaacaaattggctttgtctcattgatcagacaaaaagaaactagtattaagggaagcgcaaacacatttattttgtactgcagaaaaattgcttttttgtatcactttttgtgtaatggttagtaaatgtcatttaagtccttttatgtataaaactgccaaatgcttacctggtattttattagatgcagaaacagattggaaacagctaaattacaacttttacatatggctctgtcttattgtttcttcatactgtgtctgtatttaatctttttttatggaacctgttgcgcctatttatgaaataataaatataggtgtttgtaagtaaatttgttagtatttgaaagaggtttctttgatgttttaacttttgctggcaaaaaaaaattcacgcttggtgtgaatactttattatttagtttttacagtaacatgaataaagccaaacctgcttttcatttagcagcaaattaaagtaaccagtccttatttctgcatttctttggttgatgcaaacaaaaaactattatatttaagaactttatttcttcatacgacataacagaattgccctccaagtcacacaagctccaagactaaacaaacagacaggtcctctgtcttaaaaaggttacttcttggttctcagctggttctagtcaattctgaaccaccaccccccgccccccgcaaaaaagtaaaagtcaaaccaaacttcctcaagctgcatgcttttcacaaaatccagaaagcatttaagaattgaactaggggctggaagaagtgaaagggaagcatctaaaaatgaaaggtgagtaaccagatagcaaaagaaaagggaaagccatccaaatttgaaagctgttgatagaaattgagattcttgctgtcttttgtgcctctacaagctactactcattccagaattcctgggtcttccaagaggattcttaaggtaccagagatttgctagggaaccaaaagtgcttgagaatctgcctgagggcttgcatagctttcacattaaaaaaagaaaaagctagcagatttactcctttttaggggatcatatcaagaaagttagtctggttggaaaccaagagaatggctgatgtctctttcttggaatatgtgaaataaatttagcagtttaactaaatacaaatatatgcattgtgtaatccactcagaattaaacagacaaaaggtatgcttgctttggaatgattttaggcattgtacaaccttgaatcacttgagcatgtaataactaataaataatgcagatccatgtgattattaaaatgactgtagctgagagctctaattttcctgtcttgaaactgtataagaactcatgtgattaagttcacagtttattgtttgtctgtttagtattttagaaatataccagcactactaattaactaatgtcttttatttattatattatgataaagtaaaaatttcacttgcattaagtctaaactgagaaggtaattactgggaggagaatgagcagctttgactttgacaggcggtttgtgcaggaaagcacagtgccgtgttgtttacagcttttctagagcagctgtgcgaccagggtagagagtgttgaaattcaataccaaatacagtaaaaacaaatgtaaataaaagaaaacacatcatcaataaaactgttattatgcgtg

SEQ ID NO: 344 - DNA, 2124 bp, Homo sapiens
attccgctcttgctttccggcaggtgatggcgccccccgcggcctagaggtccagcgcccgccgcgagcagcggacagtcctcctgttgtgtccgaccgagagtcctggtgactttgaacatgctggtgccgctagccaagctgtcctgcctggcatatcagtgctttcatgccttaaaaattaagaaaaattatctacctctatgtgctataagatggtcttcaacttctactgtgcctcgaattactacccattatactatttatccccgggataaggacaagagatgggaaggagtgaacatggaaaggtttgcagaagaagcagatgttgtaatagttggtgcaggccctgcagggctctctgcagctgttcgtctaaaacagttggctgtggcacatgaaaaggacatccgtgtgtgtctagtggagaaagctgcccagataggagctcatactctctcaggggcttgccttgatccaggtgcttttaaagaactcttcccagactggaaagagaagggggctccacttaacactcctgtaacagaagacagatttggaattttaacagagaaatacagaattcctgtgccaattcttccagggcttccaatgaataatcatggcaattacattgtacgcttgggacatttagtgagctggatgggcgaacaagcagaagcccttggtgttgaagtataccctggttatgcagctgctgaggtcctttttcatgatgatggtagtgtaaaaggaattgccactaacgatgtagggatacaaaaggatggtgcaccaaaggcaacatttgagagaggactggaactacatgctaaagtcacaatttttgcagaaggttgccatggacatctagccaagcaactatataagaagtttgatttgagagcaaattgtgaacctcaaacctacgggattggactgaaggagttatgggttattgatgaaaagaactggaaacctgggagagtagatcacactgttggttggcccttggacagacatacctatggaggatctttcctctatcatttgaatgaaggtgaacccctagtagctcttggtcttgtggttggtctagactatcagaatccatacctgagtccatttagagagttccaaaggtggaaacaccatcctagcattcggccaaccttggaaggtggaaaaaggattgcatacggagccagagctctcaatgaaggtggctttcagtctataccaaaactcacctttcctggtggtttactaattggttgtagtcctggttttatgaatgttcccaagatcaaaggtactcacacagcaatgaaaagtggaattttagcagcagaatctatttttaatcaactaactagtgaaaatctccaatcaaagacaataggactccatgtaactgaatatgaggacaatttgaagaactcatgggtatggaaagagctatattctgttagaaatataagaccgtcctgccacggagtactgggtgtatatggagggatgatttacactggaatcttttactggatattgagaggaatggagccgtggactctgaaacataaaggttctgactttgaacggctcaagccagccaaggattgcacacctattgagtatccaaaacccgatggacagatcagttttgacctcttgtcatctgtggctctgagtggtactaatcatgaacatgaccagccggcacacttaaccttaagggatgacagtatacctgtaaatagaaatctgtcgatatatgatgggcccgagcagcgattctgtcctgcaggagtttatgaatttgtacctgtggaacaaggtgatggatttcggttacagataaatgctcagaactgtgtacattgtaaaacatgtgatattaaagatccaagtcagaatattaactgggtggtacctgaaggtggaggaggacctgcttacaatggaatgtaaactgcagctagccagtttctttcaagtatggcaagctaacgttaaaatgtttagagattaacagatttcagaatgtctttctgcatattactgaacagaatagtcacaaaatgattatcaaataaaaattttatactataaaaaaaaaaa

SEQ ID NO: 345 - DNA, 1944 bp, Homo sapiens
ccctctcgcgccccaggccggtgtacccccgcactccgcgccccggcctagaagctctctctccccgctccccggcccggcccccgccccgccccgccccagcccgctgggccgccatggagcgctggccttggccgtcgggcggcgcctggctgctcgtggctgcccgcgcgctgctgcagctgctgcgctcagacctgcgtctgggccgcccgctgctggcggcgctggcgctgctggccgcgctcgactggctgtgccagcgcctgctgcccccgccggccgcactcgccgtgctggccgccgccggctggatcgcgttgtcccgcctggcgcgcccgcagcgcctgccggtggccactcgcgcggtgctcatcaccggctgtgactctggttttggcaaggagacggccaagaaactggactccatgggcttcacggtgctggccaccgtattggagttgaacagccccggtgccatcgagctgcgtacctgctgctcccctcgcctaaggctgctgcagatggacctgaccaaaccaggagacattagccgcgtgctagagttcaccaaggcccacaccaccagcaccggcctgtggggcctcgtcaacaacgcaggccacaatgaagtagttgctgatgcggagctgtctccagtggccactttccgtagctgcatggaggtgaatttctttggcgcgctcgagctgaccaagggcctcctgcccctgctgcgcagctcaaggggccgcatcgtgactgtggggagcccagcgggggacatgccatatccgtgcttgggggcctatggaacctccaaagcggccgtggcgctactcatggacacattcagctgtgaactccttccctggggggtcaaggtcagcatcatccagcctggctgcttcaagacagagtcagtgagaaacgtgggtcagtgggaaaagcgcaagcaattgctgctggccaacctgcctcaagagctgctgcaggcctacggcaaggactacatcgagcacttgcatgggcagttcctgcactcgctacgcctggccatgtccgacctcaccccagttgtagatgccatcacagatgcgctgctggcagctcggccccgccgccgctattaccccggccagggcctggggctcatgtacttcatccactactacctgcctgaaggcctgcggcgccgcttcctgcaggccttcttcatcagtcactgtctgcctcgagcactgcagcctggccagcctggcactaccccaccacaggacgcagcccagggcccaaacctgagccccggcccttccccagcagtggctcggtgagccatgtgcacctatggcccagccactgcagcacaggaggctccgtgagcccttggttcctccccgaaaacccccagcattacgatcccccaagtgtcctggaccctggcctaaagaatcccacccccacttcatgcccactgccgatgcccaatccaggcccggtgaggccaaggtttcccagtgagcctctgcgcctctccactgtttcatgagcccaaacaccctcctggcacaacgctctaccctgcagcttggagaactccgctggatggggagtctcatgcaagacttcactgcagcctttcacaggactctgcagatagtgcctctgcaaactaaggagtgactaggtgggttggggaccccctcaggattgtttctcggcaccagtgcctcagtgctgcaattgagggctaaatcccaagtgtctcttgactggctcaagaattagggccccaactacacacccccaagccacagggaagcatgtactgtacttcccaattgccacattttaaataaagacaaatttttatttcttctaaaaaaaaaaaaaaaaaaaaaaaaaaaaaaaaaaaaaaaaaaaaaaaaaaaaaaaaaaaaaaaa

SEQ ID NO: 346 - DNA, 3744 bp, Homo sapiens
gacagacaggatggacttcctccggctatacctccctgggctgcaccaggccttgaggggggcactggattccctcggcacctttgtctcctacctcctgggagatgcagtccccactgtagagcgggaggcgcaggcggctgaggaactgggggtggtggcggtgggaaagacagggaagattgtagaggaggaagcccaggaggacctggagggccttagaggcagccaaaacgagggggctggaaggctgagagggcctggagatgacagaagacatgaagtggggagctcagctgtagaacagacctggggctggggagatggcagctcccatgggtcccaagcagagaggcaggacagtggggctggggagacagccaaggctgccaggtgccaggagccaagcgcccacttggaggccagaaagaaatccaaggcagggtctggggcttgccaagacaggagcggccaagcccaggagaggcaggagtcccatgagcaggaagtgaacagagaagagaggctgagaagctgggaacaggaggaggaggaggaagaggtcagggcaagagagccagggatggccagaggggcggagtcagagtggacctggcatggggagacggaggggaaggctggtgctgttgggccaaaggcggcaggggacaaccgggagatggagcagggggtcagggaggcagatgcaggggaaactgaggagcctggggccgaaggggctgggaaaggagaagaggtggtagtggtggagaaggcctgtgaaagcactagggcatgggggacgtggggcccaggggcagagcctgaggactggggaatcttaggcagagaggaggccaggacaaccccaggtagggaagaggccagggcaattttagatggggaggaagccaggacaatctcaggcggggaggaggctgagacagcctcaggcggggaggaggctgaaacagcctcaggcggggaggaggccgggacagcctcgggaggggaggaggccgggatatcctcaggcggggaggctgggacagcctcaggaggggaggaggccgggacagcctcaggaggggacgaggcctggacaacctcaggcaaagaggaggctgacctgctgggagtcagacagactcaatatggagcagttccaggagaaaggctcctagaggctactggaaaagtctgggtcctagaggaggagggggatgaggagagagaggctgaggtgagccctttccccaaacaggcccaggtcctgggcactgaaagaacagaagaggctgctgagagccagaccgcagggagggaagctgtgggaggccaggaggcaggggagagctttgagggccaggtagacctgcgtggtaaggaggctgagatgaggcaggacttggggatcagggccgaccgggccaggatggaagagctggtacaggcagaggaggcccaggaggagagagggagcagcagggatccagtggctgagctgccctcagatggagaggctgaaggcactgccgacttggaggcaactccagaggccaggcctgaggaggagctcacaggggaggagagtgaggcggcccagactagctgtggcctactgggcgtggaatggggtggcctcacacacagcgtcaccaaaggccagggacctgagctgatggggggtgcccagaccccaactaagcaacccgaggaaagggaggcaggggaggtggagctcatgggagttctggccctgagcaaagaggagcaggagaggagcctggaggcaggtcccaggcacgcggggtctgtaaagcctgaggcctccgaggccttcccaggagcctgggaaaaccgcacgagaaaggacatggagagaggaaatactcaggaggatgcggccgatggcgagcagcgggaggaggaggagactgcgggaggccagaccctggcggctgaggctgaaggagaccgagagtctgaactatcagaagtcccagaggcaggcggggaggggctgacaacccaggacgcgggatgtggaactgaggagggagaggcatctgtctcagagaaccaggagctggacggaagcacaggggcagacgcagggccttgcccgtcactgggagaggcctatgccagagaaactgaggatgaggaggcggaggctgacagaacatccagaagaggctggaggctgcaagcggtggctgtgggcctcccggaccgtgaggatgcacagactggctctgtggctgctgggattatggggggtgatgtggtcccacacatcagcgctgctggcgctggtgaagctttggaaggggcgcttgggcaaggctgggactcgaaagaaaaggaagaggcagcagcaggagagcatgcaggtgggcaagaatttggtctggagggctcagcagaggaagaggtgactggcagaggcagccaagtagaggcttttgagtccagggagggaggaccttggggagggcgggtagaggccgaggaatctgcaggcgcagaggacagctgtgggctggatcccgcgggctcccagacagcgagggcagaggggatgggagccatggtggaggctggggggcttctagaaaagtggacgctgttggaagaagaggctgttggatggcaggagagagaacagagggaagacagtgaggggcggtgtggggactaccaccctgagggagaggcaccaaggctccttgatgcagagggtctcatggtgaccgggggccggagggcagaggccaaggagactgagccagaaagcctggaacatgtcaggggccaggaggagcagccaacacaccaggcccctgcagaagctgcgccggagtcagtcggggaagccgagacggctgaggccatgggcagtgccagaggaggtgctgccaacagctggagcgaggccccgctccccgggtccctcctagacgtctctgtcccaaggagtcgcgtgcacctctcgagaagctcctcacagcgtcgctcccggccctcttttcgtcggactccggcctgggagcagcaggaggagcccccagcccccaaccctcctgaggaggagctgtcagctcctgagcagagacccctccagctggaggaacccctggagccaagccctctgaggcatgatgggaccccggtgccagccaggagaaggcccctgggacacgggtttggcctcgcgcaccctggcatgatgcaggagctgcaagcccgtctgggccggcctaagccccagtgactgagacccggtgctctgggagccaggccctgagtgggtgccagaaggcttgctccaatgccactgagccctgctccctctgccactgtggacacatcctctccaccctctgggcctcagtgtcttgatgtatcattcatggagcaggcaaaaccagacgtctgggaataccgtgaacttaaggagtctgattctccgacacaggctggtggaccacctaccccactgagaccacctctcagggtgcctgccctggttcctccccagcctgagtcagctgtctggactgcaaggaggctgggcacgggggctcacgcctgtcaccccagagctttgggaggccaaggtgggaggatcgcttgagaccaggagttcgagaccagcctgggcagcatagcaagatccccatcttttaaaaacaaaataaaacaataaagactgcaaggaaaaaaaaaaaaaaaaaaaaa

SEQ ID NO: 347 - DNA, 12050 bp, Homo sapiens
ggccccggagctggcccatggggagcaggcgcccggtgccggccacgacgaccgccaccgcccgcgccgcgaccggccggtgaagcccagggacccccctctgggagagccccatgagggcaggagagtgatggagagtacgcccagcttcctgaagggcaccccaacctgggagaagacggccccagagaacggcatcgtgagacaggagcccggcagcccgcctcgagatggactgcaccatgggccgctgtgcctgggagagcctgctcccttttggaggggcgtcctgagcaccccagactcctggcttccccctggcttcccccagggccccaaggacatgctcccacttgtggagggcgagggcccccagaatggggagaggaaggtcaactggctgggcagcaaagagggactgcgctggaaggaggccatgcttacccatccgctggcattctgcgggccagcgtgcccacctcgctgtggccccctgatgcctgagcatagtggtggccatctcaagagtgaccctgtggccttccggccctggcactgccctttccttctggagaccaagatcctggagcgagctcccttctgggtgcccacctgcttgccaccctacctagtgtctggcctgcccccagagcatccatgtgactggcccctgaccccgcacccctgggtatactccgggggccagcccaaagtgccctctgccttcagcttaggcagcaagggcttttactacaaggatccgagcattcccaggttggcaaaggagcccttggcagctgcggaacctgggttgtttggcttaaactctggtgggcacctgcagagagccggggaggccgaacgcccttcactgcaccagagggatggagagatgggagctggccggcagcagaatccttgcccgctcttcctggggcagccagacactgtgccctggacctcctggcccgcttgtcccccaggccttgttcatactcttggcaacgtctgggctgggccaggcgatgggaaccttgggtaccagctggggccaccagcaacaccaaggtgcccctctcctgagccgcctgtcacccagcggggctgctgttcatcctacccacccactaaaggtgggggtcttggcccttgtgggaagtgccaggagggcctggaggggggtgccagtggagccagcgaacccagcgaggaagtgaacaaggcctctggccccagggcctgtccccccagccaccacaccaagctgaagaagacatggctcacacggcactcggagcagtttgaatgtccacgcggctgccctgaggtcgaggagaggccggttgctcggctccgggccctcaaaagggcaggcagccccgaggtccagggagcaatgggcagtccagcccccaagcggccaccggacccttttccaggcactgcagaacagggggctgggggttggcaggaggtgcgggacacatcgatagggaacaaggatgtggactcgggacagcatgatgagcagaaaggaccccaagatggccaggccagtctccaggacccgggacttcaggacataccatgcctggctctccctgcaaaactggctcaatgccaaagttgtgcccaggcagctggagagggaggagggcacgcctgccactctcagcaagtgcggagatcgcctctgggaggggagctgcagcaggaggaagacacagccaccaactccagctctgaggaaggcccagggtccggccctgacagccggctcagcacaggcctcgccaagcacctgctcagtggtttgggggaccgactgtgccgcctgctgcggagggagcgggaggccctggcttgggcccagcgggaaggccaagggccagccgtgacagaggacagcccaggcattccacgctgctgcagccgttgccaccatggactcttcaacacccactggcgatgtccccgctgcagccaccggctgtgtgtggcctgtggtcgtgtggcaggcactgggcgggccagggagaaagcaggctttcaggagcagtccgcggaggagtgcacgcaggaggccgggcacgctgcctgttccctgatgctgacccagtttgtctccagccaggctttggcagagctgagcactgcaatgcaccaggtctgggtcaagtttgatatccgggggcactgcccctgccaagctgatgcccgggtatgggcccccggggatgcaggccagcagaaggaatcaacacagaaaacgcccccaactccacaaccttcctgcaatggcgacacccacaggaccaagagcatcaaagaggagacccccgattccgctgagaccccagcagaggaccgtgctggccgagggcccctgccttgtccttctctctgcgaactgctggcttctaccgcggtcaaactctgcttgggccatgagcgaatacacatggccttcgcccccgtcactccggccctgcccagtgatgaccgcatcaccaacatcctggacagcattatcgcacaggtggtggaacggaagatccaggagaaagccctggggccggggcttcgagctggcccgggtctgcgcaagggcctgggcctgcccctctctccagtgcggccccggctgcctcccccaggggctttgctgtggctgcaggagccccagccttgccctcggcgtggcttccacctcttccaggagcactggaggcagggccagcctgtgttggtgtcagggatccaaaggacattgcagggcaacctgtgggggacagaagctcttggggcacttggaggccaggtgcaggcgctgagccccctcggacctccccagcccagcagcctgggcagcacaacattctgggagggcttctcctggcctgagcttcgcccaaagtcagacgagggctctgtcctcctgctgcaccgagctttgggggatgaggacaccagcagggtggagaacctagctgccagtctgccacttccggagtactgcgccctccatggaaaactcaacctggcttcctacctcccaccgggccttgccctgcgtccactggagccccagctctgggcagcctatggtgtgagcccgcaccggggacacctggggaccaagaacctctgtgtggaggtggccgacctggtcagcatcctggtgcatgccgacacaccactgcctgcctggcaccgggcacagaaagacttcctttcaggcctggacggggaggggctctggtctccgggcagccaggtcagcactgtgtggcacgtgttccgggcacaggacgcccagcgcatccgccgctttctccagatggtgtgcccggccggggcaggcgccctggagcctggcgccccaggcagctgctacctggatgcagggctgcggcggcgcctgcgggaggagtggggcgtgagctgctggaccctgctccaggcccccggagaggccgtgctggtgcctgcaggggctccccaccaggtgcagggcctggtgagcacagtcagcgtcactcagcacttcctctcccctgagacctctgccctctctgctcagctctgccaccagggacccagccttccccctgactgccacctgctttatgcccagatggactgggctgtgttccaagcagtgaaggtggccgtggggacattacaggaggccaaatagagggatgctaggtgtctgggatcggggtggggacaggtagaccaggtgctcagcccaggcacaacttcagcaggggatggcgctaggggacttggggatttctggtcaaccccacaagcaccactctgggcacaagcagggcactctgttcccctcccccttaagccaacaaccacagtgccaccaagctcacacctgtccttctcaggctggcatctcccccaccctgtgccccttttcatggtaccaggcccgcactgggggcaattgacttcctccaatccccactcctccgagacccaggagacaaacagcccttccttggggaaacttgggaatcattctggcttaaacaacacctcctcctgctgctcactcccgctgagcccactctactgccccagctccgtttctaccaccgcatcctcactgggctcactgcaggcatgctgaacaaggggcctccaaccttctgccctcctgccaaaagatctggggagtgtgaggagagggtggcatcaggagctgctcaggcttggcggagggagcggcatgggcgatgtcactcagccccttcccggtccgcccgcttccctccttcatgatttccattaaagtctgttgttttgtgactgctgccagtgtggttggccctgcccctgcaggccacatggtccagggagggagggggacatggaaatctgccttagagacaaatggagtagggcagcccggagctggggcccaagggacaggacaccactgcctgctcttcgtctggggcctggggccttgcctcccactgaggagactttgggtggggtggggggctgtcccccaaagatgctcctgagtgcaagagcaggcaaggcagagtcctggggcacagccacgaggtgacctccctgtgcagagactcccgagccctactccacccagcaagctccagtccgccccatctctcccgtctaccctgacctggagatccagaagtatggcccagaagagcccttgccccgcctgtctgcccttggtggcagtggccatggccgacgccaggcccagccaccctgggactgagcctgactgcttcagacagccgacccctccttgtccccgctccacgcccgcagcctcctggtggcgctccgccctctcccgcttcctttgtgtatctcagccctacaaagaaaaacactcccactcttgtcatacctaattgttcctgctgtggtttggggaattttttttattaaataaagttttttattataagggtaaggaaggagcaggaggcagcccaggcggagcgggaggagctggcagcggggcgcatgccaggcgggggtcctcagggcgccccagccgccgccggcggcggcggcgtgagccaccgcgcaggcagccgggattgcttaccacctgcagcgtgctttcggaggcggcggctggcacggaggccgggctacatgagaagctcgacagggcctgggatcgggttcctttccccagcagtgggcacactgttccggttcccaggaggggtgtctggcgaggagtcccaccactcggagtccagggccagacagtgtggccttgactcgagaggcctcttggtccggagccctgtttccaagagtgcagcagcccctactgtgacctctgtgagaggaacctcggcgcactttgggattcagctcagaggtggcaccagattgcctgacaggcttagctggccgtgtggccctgggagtgctgggtggcagcaagagtttgcagccatggatagttctgagaccctggacgccagctgggaggcagcctgcagcgatggagcaaggcgtgtccgggcagcaggctctctgccatcagcagagttgagtagcaacagctgcagccctggctgtggccctgaggtccccccaacccctcctggctctcacagtgcctttacctcaagctttagctttattcggctctcgcttggctctgccggggaacgtggagaagcagaaggctgcccaccatccagagaggctgagtcccattgccagagcccccaggagatgggagccaaagctgccagcttggacgggcctcacgaggacccgcgatgtctctctcggcccttcagtctcttggctacacgggtctctgcagacttggcccaggccgcaaggaacagctccaggccagagcgtgacatgcattctttaccagacatggaccctggctcctccagttctctggatccctcactggctggctgtggtggtgatgggagcagcggctcaggggatgcccactcttgggacaccctgctcaggaaatgggagccagtgctgcgggactgcctgctgagaaaccggaggcagatggaggtaatatccttaagattaaaacttcagaaacttcaggaagatgcagttgagaatgatgattatgataaagctgagacgttacaacaaagattagaagacctggaacaagagaaaatcagcctgcactttcaacttccttcaaggcagccagctcttagcagtttcctgggtcacctggcagcacaagtccaggctgccttgcgccgtggggccactcagcaggccagcggagatgacacccacaccccactgagaatggagccgaggctgttggaacccactgctcaggacagcttgcacgtgtccatcacgagacgagactggcttcttcaggaaaagcagcagctacagaaagaaatcgaagctctccaagcaaggatgtttgtgctggaagccaaagatcaacagctgagaagggaaatagaggagcaagagcagcaactccagtggcagggctgcgacctgaccccactggtgggccagctgtccctgggtcagctgcaggaggtcagcaaggccttgcaggacaccctggcctcagccggtcagattcccttccatgcagagccaccggaaaccataaggagcctccaggaaagaataaaatccctcaacttgtcacttaaagaaatcactactaaggtgtgtatgagtgagaaattctgcagcaccctgaggaagaaagttaacgatattgaaacccaactaccagccttgcttgaagccaaaatgcatgccatatcaggaaaccatttctggacggctaaagacctcaccgaggagattagatcattaacatcagagagagaagggctggagggactcctcagcaagctgttggtgttgagttccaggaatgtcaaaaagctgggaagtgttaaagaagattacaacagactgagaagagaagtggagcaccaggagactgcctatgaaacaagtgtgaaggaaaatactatgaagtacatggaaacacttaagaataaactgtgcagctgcaagtgtccactgcttgggaaagtgtgggaagctgacttggaagcttgtcgattgcttatccagagcctacagctccaggaagccaggggaagcctgtctgtagaagatgagaggcagatggatgacttagagggagctgctcctcctattccccccaggctccactccgaggataaaaggaagacccctttgaaggtattggaagaatggaagactcacctcatcccctctctgcactgtgctggaggtgaacagaaagaggaatcttacatcctttctgcagaacttggagaaaagtgtgaagacataggcaagaagctattgtacttggaagatcaacttcacacagcaatccacagtcatgatgaagatctcattcagtctctcaggagggagctccagatggtgaaggaaactctgcaggccatgatcctgcagctccagccagcaaaggaggcgggagaaagagaagctgcagcttcctgcatgacagctggtgtccacgaagcacaagcctgaggagtgacgggatgggggagggaggtgggccaccatgtttggacccggggggctgctcttccctcccccgccatagctaagatgcctgaatcaattacggagatacagagccttgaggtctttcagtggaaaggtggttcatgttcattctcatcagtgtgaaactgaggagtctgcaatttggaatatggagagagagactgatttgctgaatttccttctaaatgtcactcaaaaatttcttttccatgtcattcttgggaatgtcttccacaggatttgagaatagtttcatctcagcccccattagagagaagttggggtgaattctggaaaaatgtctctttttcctgtgccatttgccttctgctgcaacgaaaatatttcctgattcaagattctataaaaaggaaaccaagcataagactctgtcatcatacctgttacacgttcctacaggtgcacaatctaagagagctaattaacctcagagtctggagttaacagcttttcaccttacttctcctgtgatctaatattatcttagaaaaattaatatgcaatttccaaaagatattttggtaagacaacaacctcccagtgatatgccacctttcaattttccttttgtggcaatgattgcatctgaagaaaggatccctgagagtctctgtttcatcaggacattctgaaatttacccacagtgaggctgtggatggatcaggggacctgtataaaatgtttgagcctgttccattttcccgtggaacctgtttcactcaatgccaggcagtgcagcatttaggaaagcagtgcagtactcagtaaggcagtgcagtactcagtaacacaatacagtactcaggcagtgcagtactcagtaagacagtgcagtgctcagtaaggcagtgcaatactcagtaacagtgtagtactcagtaacagtgaagtactcagtaatacagtacagtattcagtaaggcagtgaagtactcagtaatacaatacagtactcagttaggcagtgcagtactcaggaatgcagcacagtactcaggcagtgcaatactcagtgcggtactcagtaacacagtgcagtactcagtaacagtgcagtactcagtaacagtgcagtactcagtaaggcagtgcagtactcagtaacacagtgcagtactcagtaatacagtacagtactcagtaaggcagtatggtactcagtaaagcaatgcaatgctcagtaacacagtgcagtgctcaataaggcagtgcagtgctcagtaaggcagtgaattgcttagtaacacagtgtagtgctcagtaggacagcatagtactcagtaacacagggcagctagtactcagtactataagtactgagtacttatataggcaatgtagtactcagtaaatcagtgcagtactcagtaatgcaagggcatttcaggctcctgctgggctgcttctttggcccagctgggactcctattgagacagctgcaaaacaggctgatttcaattaggcagcacttcccaaagtgcactgaggaaggtggccccaagagaagctctctaaacaaaggagtaccctctctggtcaagtacctttggtaaatacaccataccataatatctgcttggagaaccacaatgcacattagcatattagtctgagagagaacttatagtaaggaaactcacttgattttatctaacctcaaactttccaagtttaatggatcgtgaatttttttcatgtaactcctattcatatcccatagatctagtattgtacagcactgcattctctgaggaagtcccagtccaaactctgatttacatcactttagaaaccacactcacacttttgcagagtgttgagcttaataactacctgccacagattggtaaatttaatccagtggttgttctgtttgtgcttctgttctcatttatgtgtttagggatagtgaggttcctgccttcactaggatccacggatatgagaccatttttgtcatttcctgaagtcacactggcgtttccagaaggcatctggtgctttgctcagccttccatgctgtgcagcacttctgtcctcagtcaaggagatggccatgcttaagccagcaattggctggggtccaggaaacaaagcaaaagcacaatatgtgaatgtgctgattgtgttccctatggctttatctcgagcaaaatacactctacatattttaataataagtataattagcttgttcctggacttcattttcaatgatgaaccaaattcctgaattatttataattgtgtctaaagaaaattatgaactggtcacatggcacttggaatccttgagttaattccagtgaagcaaaacttgggaagagtcaggattggccacattgccaataacaaattcctacttcgacatatgtcttttcaaaaagcctcccagacacaagacatcttaaccgtcactagcccaagtgttttgtattactcagacaccatcatgaaataattctgtgaggtcatgatgtatttgaaaattctgcaagttaataactgccttgaattgtttgaacccgaaataagggttctttggtacctctagtagatagtgtgttcatttccctgctgcaaattttgaagtatttgggcaggtgagtcatgttttaaccacaagccataactcatctgttgtctttgcttggtcttagagtatcattcagaaagtccgctaagggccagcgtgcttcttctggctacacaaccttctcaggacaagcccactgtcttaagccactttgaccctgggagacacaggactgtgtatcctcaatcatactatacagcagtttttgtcaggggaacataaaaatatccaagagaggttagggcttagatttaaaagcatcaaaacaacaacaatggaaatttatgttggcgatagccaagaccacaagcaaaagcacatactggaaatgatgagttagaatctgatttgactgggatgttttatgagaatgtaagtgtgatattatactgtctgccttgctggaatgctggctttcaaatggtcacccatttttctttcactggcctgagttaggacatgctatcagtaatagtcccagttccatccaactttctgaaatttcatttttttttttgagatggagtctctctctgtcacccaagttggagtgcagtggccccgcaatctcggctcactgcaacctctacctcccaggttcaagctattctactgcctcagcctcccaagtagctggggttacaggcatttgccaccgggccctgatgatttttgtatttttagtagagacagggcttcaccatgttggctaggagggtctcaaactcctgacctcaggcgatccacccccacctcggcttcccaaagtgctgagattacaggtgtgagccaccgcacccggccaactttctgaaatttcaaaactgaattgatccttctccaaattagtatatactattggaaacttgtctttccctgcagtaaggctggtttccccaccccagaaacatgtaacggttggtaccatgctaagcccttgccatgctaagccctttacagtcatatcctataatccccatatcaaccttataaggaaggtgtttgtagatgatgcaactgagccttaagaggactaattccctttttctaaggcacagagctggtaaaatgtgaagtaatagtgaacctaacagtcagagacaggcagcatgctcttaactagtgctcttcctaaagttcctttaatgtccttttgagattttgagccatggaacttacttgttcacctggctaagaactcatggccactgtggaaatcttggttagggagtcaaagaaactgagcctggggcaaacgaggcttcccacactgccaggggagcctcactgtgaagtctaggctcagacaggcatcaacaaacctattcaccccaccatcatcctgatctaaccattccccagtcatcccaggaaaaccactcacagcctgacactgggctgactttcttgaagatcctcatccaattggtgtttttcagaagtgttccaatattatgaattctgtgttgtggagaaaagcaaccatgcatttactggtcaatgccttcttgtatatgtaattcaatacttttacttttaatatcctcaccttatctaatctttgaattttgtcatgtaatttattgcttcattaaggttactttttgttatacaaaataaaagctgatatccaaggcatggtgcatcttgatgattttttgtcctttgaagtatggatgatagaaaaatgtatcaggtttattcatctcatctttctgttacaggatgattaattgtacagttacatcacacgaaacatttataataaagtcatgctttagaaaaaaaaaaaa

SEQ ID NO: 348 - DNA, 3198 bp, Homo sapiens
atttgaggtgttctgaccagaagaagacagagcggatgatcattcattcaccacgttgacaacctcgcctgtgattgacagctggagtggcagaaagccatgagatttggtagttgggtctgaggggcgctcttttttttccttttctttctttctttctttttttttttttaaactgatttttgggggagagaagatctgcttttttttgcccccgctgctgtcttggaaacggagcgcttttatgctcagtgactcgggcgctttgcttcaggtcccgtagaccgaagatctgggaccagtagctcacgttgctggagacgttaagggatttttcgtcgtgcttttttttttttttttttttttttccgggggagtttgaatatttgtttcttttcacactggccttaaagaggatatattagaagttgaagtaggaagggagccagagaggccgatggcgcaaaggtacgacgatctaccccattacgggggcatggatggagtaggcatcccctccacgatgtatggggacccgcatgcagccaggtccatgcagccggtccaccacctgaaccacgggcctcctctgcactcgcatcagtacccgcacacagctcataccaacgccatggcccccagcatgggctcctctgtcaatgacgctttaaagagagataaagatgccatttatggacaccccctcttccctctcttagcactgatttttgagaaatgtgaattagctacttgtaccccccgcgagccgggggtggcgggcggggacgtctgctcgtcagagtcattcaatgaagatatagccgtgttcgccaaacagattcgcgcagaaaaacctctattttcttctaatccagaactggataacttgatgattcaagccatacaagtattaaggtttcatctattggaattagagaaggtacacgaattatgtgacaatttctgccaccggtatattagctgtttgaaagggaaaatgcctatcgatttggtgatagacgatagagaaggaggatcaaaatcagacagtgaagatataacaagatcagcaaatctaactgaccagccctcttggaacagagatcatgatgacacggcatctactcgttcaggaggaaccccaggcccttccagcggtggccacacgtcacacagtggggacaacagcagtgagcaaggtgatggcttggacaacagtgtagcttcccccagcacaggtgacgatgatgaccctgataaggacaaaaagcgtcacaaaaagcgtggcatctttcccaaagtagccacaaatatcatgagggcgtggctgttccagcatctaacacacccttacccttctgaagaacagaaaaagcagttggcacaagacacgggactcaccatccttcaagtgaacaattggtttattaatgcccggagaagaatagtgcagcccatgatagaccagtccaaccgagcagtaagtcaaggaacaccttataatcctgatggacagcccatgggaggtttcgtaatggacggtcagcaacatatgggaattagagcaccaggacctatgagtggaatgggcatgaatatgggcatggaggggcagtggcactacatgtaaccttcatctagttaaccaatcgcaaagcaagggggaaggctgcaaagtatgccaggggagtatgtagcccggggtggtccaatgggtgtgagtatgggacagccaagttatacccaaccccagatgcccccccatcctgctcagctgcgtcatgggccccccatgcatacgtacattcctggacaccctcaccacccaacagtgatgatgcatggaggaccgccccaccctggaatgccaatgtcagcatcaagccccacagttcttaatacaggagacccaacaatgagtggacaagtcatggacattcatgctcagtagcttaagggaatatgcattgtctgcaatggtgactgatttcaaatcatgttttttctgcaatgactgtggagttccattcttggcatctactctggaccaaggagcatccctaattcttcatagggacctttaaaaagcaggaaataccaactgaagtcaatttgggggacatgctaaataactatataagacattaagagaacaaagagtgaaatattgtaaatgctattatactgttatccatattacgttgtttcttatagattttttaaaaaaaatgtgaaatttttccacactatgtgtgttgtttccatagctcttcacttcctccagaagcctccttacattaaaaagccttacagttatcctgcaagggacaggaaggtctgatttgcaggatttttagagcattaaaataactatcaggcagaagaatctttcttctcgcctaggatttcagccatgcgcgcgctctctctctttctctctcttttcctctctctccctctttctagcctggggcttgaatttgcatgtctaattcatttactcaccatatttgaattggcctgaacagatgtaaatcgggaaggatgggaaaaactgcagtcatcaacaatgattaatcagctgttgcaggcagtgtcttaaggagactggtaggaggaggcatggaaaccaaaaggccgtgtgtttagaagcctaattgtcacatcaagcatcattgtccccatgcaacaaccaccaccttatacatcacttcctgttttaagcagctctaaaacatagactgaagatttatttttaatatgttgactttatttctgagcaaagcatcggtcatgtgtgtattttttcatagtcccaccttggagcatttatgtagacattgtaaataaattttgtgcaaaaaggactggaaaaatgaactgtattattgcaatttttttttgtaaaagtagcagtttggtatgagttggcatgcatacaagatttactaagtgggataagctaattatactttttgttgtggataaacaaatgcttgttgatagcctttttctatcaagaaaccaaggagctaattattaataacaatcattgcacactgagtcttagcgtttctgatggaaacagtttggattgtataataacgccaagcccagttgtagtcgtttgagtgcagtaatgaaatctgaatctaaaataaaaacaagattatttttgtcaaaaaaaaaaaaaaaaaa

SEQ ID NO: 349 - DNA, 3018 bp, Homo sapiens
cgcaccccgcgcagcggctgagccgggagccagcgcagcctcggccccgcagctcaagcctcgtccccgccgccgccgccgccgccgccgccgccgcccccggggcatggcctgtctgatggccgctttctcggtcggcaccgccatgaatgccagcagttactctgcagagatgacggagcccaagtcggtgtgtgtctcggtggatgaggtggtgtccagcaacatggaggccactgagacggacctgctgaatggacatctgaaaaaagtagataataacctcacggaagcccagcgcttctcctccttgcctcggagggcagctgtgaacattgaattcagggacctttcctattcggttcctgaaggaccctggtggaggaagaaaggatacaagaccctcctgaaaggaatttccgggaagttcaatagtggtgagttggtggccattatgggtccttccggggccgggaagtccacgctgatgaacatcctggctggatacagggagacgggcatgaagggggccgtcctcatcaacggcctgccccgggacctgcgctgcttccggaaggtgtcctgctacatcatgcaggatgacatgctgctgccgcatctcactgtgcaggaggccatgatggtgtcggcacatctgaagcttcaggagaaggatgaaggcagaagggaaatggtcaaggagatactgacagcgctgggcttgctgtcttgcgccaacacgcggaccgggagcctgtcaggtggtcagcgcaagcgcctggccatcgcgctggagctggtgaacaaccctccagtcatgttcttcgatgagcccaccagcggcctggacagcgcctcctgcttccaggtggtctcgctgatgaaagggctcgctcaagggggtcgctccatcatttgcaccatccaccagcccagcgccaaactcttcgagctgttcgaccagctttacgtcctgagtcaaggacaatgtgtgtaccggggaaaagtctgcaatcttgtgccatatttgagggatttgggtctgaactgcccaacctaccacaacccagcagattttgtcatggaggttgcatccggcgagtacggtgatcagaacagtcggctggtgagagcggttcgggagggcatgtgtgactcagaccacaagagagacctcgggggtgatgccgaggtgaacccttttctttggcaccggccctctgaagaggtaaagcagacaaaacgattaaaggggttgagaaaggactcctcgtccatggaaggctgccacagcttctctgccagctgcctcacgcagttctgcatcctcttcaagaggaccttcctcagcatcatgagggactcggtcctgacacacctgcgcatcacctcgcacattgggatcggcctcctcattggcctgctgtacttggggatcgggaacgaagccaagaaggtcttgagcaactccggcttcctcttcttctccatgctgttcctcatgttcgcggccctcatgcctactgttctgacatttcccctggagatgggagtctttcttcgggaacacctgaactactggtacagcctgaaggcctactacctggccaagaccatggcagacgtgccctttcagatcatgttcccagtggcctactgcagcatcgtgtactggatgacgtcgcagccgtccgacgccgtgcgctttgtgctgtttgccgcgctgggcaccatgacctccctggtggcacagtccctgggcctgctgatcggagccgcctccacgtccctgcaggtggccactttcgtgggcccagtgacagccatcccggtgctcctgttctcggggttcttcgtcagcttcgacaccatccccacgtacctacagtggatgtcctacatctcctatgtcaggtatgggttcgaaggggtcatcctctccatctatggcttagaccgggaagatctgcactgtgacatcgacgagacgtgccacttccagaagtcggaggccatcctgcgggagctggacgtggaaaatgccaagctgtacctggacttcatcgtactcgggattttcttcatctccctccgcctcattgcctattttgtcctcaggtacaaaatccgggcagagaggtaaaacacctgaatgccaggaaacaggaagattagacactgtggccgagggcacgtctagaatcgaggaggcaagcctgtgcccgaccgacgacacagagactcttctgatccaacccctagaaccgcgttgggtttgtgggtgtctcgtgctcagccactctgcccagctgggttggatcttctctccattcccctttctagctttaactaggaagatgtaggcagattggtggtttttttttttttaacatacagaattttaaataccacaactggggcagaatttaaagctgcaacacagctggtgatgagaggcttcctcagtccagtcgctccttagcaccaggcaccgtgggtcctggatggggaactgcaagcagcctctcagctgatggctgcacagtcagatgtctggtggcagagagtccgagcatggagcgattccattttatgactgttgtttttcacattttcatctttctaaggtgtgtctcttttccaatgagaagtcatttttgcaagccaaaagtcgatcaatcgcattcattttaagaaattatacctttttagtacttgctgaagaatgattcagggtaaatcacatactttgtttagagaggcgaggggtttaaccgagtcacccagctggtctcatacatagacagcacttgtgaaggattgaatgcaggttccaggtggagggaagacgtggacaccatctccactgagccatgcagacatttttaaaagctatacaaaaaattgtgagaagacattggccaactctttcaaagtctttctttttccacgtgcttcttattttaagcgaaatatattgtttgtttcttcctaaaaaaaaaaaaaaaaaaaaaaaaa

SEQ ID NO: 350 - DNA, 2305 bp, Homo sapiens; identical to SEQ ID NO: 284

SEQ ID NO: 351 - DNA, 3108 bp, Homo sapiens
gctcacttccagccgcctgtcacagtactgggagtaagaggtgacctatttatttttagaagggggcagtgataataacccagctcctagcttcattcaagggaggcaggcgctttggaagtttgtaaacaccaactttctgagtaagggaggagcactttttttccaaaaaggaaagaacgtctctactgggtttttttcctcctgatattcagcattagagtagaaaagaaactattgtttggccacattagccgtggttagcaggtgctgcagcctttgccactgttattatttttaaagggcagaaatgcctgaaggtgaagactttggaccaggcaaaagctgggaagttatcaattccaaaccagatgaaagacccaggctcagccactgtattgcagaatcatggatgaatttcagcatatttcttcaagaaatgtctctttttaaacagcagagccctggcaagttttgtctcctggtctgtagtgtgtgcacattttttacgatcttgggaagttacattcctggggttatactcagctatctactgttactgtgtgcatttttgtgtccattgtttaaatgtaatgatattggacaaaaaatttacagcaaaattaagtcagttctgctgaaactggattttggaattggagaatatattaatcagaagaaacgtgagagatctgaagcagacaaagaaaaaagtcacaaagatgacagtgaattagacttttcagctctttgtcctaagattagcctcacggttgctgccaaagagttatctgtgtctgacacagacgtctcagaggtatcctggactgataatgggaccttcaacctttcagaaggatacactccacagacagacacttctgatgatcttgaccgacccagtgaggaagttttctctagagatctttcagattttccatctctagaaaatggcatgggaacaaatgatgaagatgaattaagccttggtttgcccactgagctcaagagaaagaaggaacagttggacagtggtcacagaccaagcaaagagacgcaatcagcagctggtctcacccttcctctgaacagtgaccaaacctttcacctgatgagcaacctggctggggatgttatcacagctgcagtgactgcagctatcaaagaccagttagagggtgtgcagcaagcactttctcaggctgcccccatcccagaagaggacacagacactgaagaaggtgatgactttgaactacttgaccagtcagagctggatcaaattgagagtgaattgggacttacacaagaccaggaagcagaagcacagcaaaataagaagtcttcaggtttcctttcaaatctgctgggaggccattaatctaggaatcagcttgcaacagagcacaaaaaacaccaaaaaaatttcaaacaagaaaaaaaaaaaaaaaaggaaaagaaaaaaattgaactgtaagctttaatgattactttagatttgttttattttccctcctgcagtgaattaattggatatatatcagctgacactgatagattgatatttctgatcgttatttttgtgtaataagcatggaaatgaactttatacacaccactgtgttgtcagagataaatattaggggttgtttttaaagcaaaaagaaaaaaacaaaaaccaaactattaaaatcctcctataaatattctttttctttacagtttttcaagcatgcaaaacagtttattgtaacttactgaaaaatattaacaattaattgtgaatacatgctgttaccagcttccttattcctaatacctggaaaatttttttttcaacggatagattttgatgtaaaaaagaccgaaattatcaaggtatcttagttgaaggacttgggaaatactatcaaaattaatttcttaggaaaaaatttaaaagtatatttaagtactctggatagactgaaacgtttccatgttatttctgcagttgtagacttaggcttatttgtaaagaagcatgctccattgactgccatctctagtcttgcagtgggtggtattaacccatagaaagcaagcagttgtgtatcacatagacaatggttatgatgtaaacagattcagttgttttgttgttcattcgtcatatgtttgtgatagggatgttgggagcacagctctattctgcctgctcagacttaagttagacccttatcttttatattatgtcatgaaaaaagtctcctaaaattgtgaaactagttcttgatgagtgatgtgatcatcagcaataaagatataataactctgttttcttagcctgtatagaggagaggaacttgcttggctttaaaatatatttatttgccatttaagtataaatatggaatctgtttcttattgggaagatagaatatatatattttcctttaaactttttaaggtcacttttaaataaccaaatttgatttatggtttttaacaaaggactaaagagctgaaaccaacctagttttgtttttgtgatataaactttaagtgtcgagggaccatgccagcaactaccaaaaatctcttaaatcttcaggtacagctggcattttggcagatgcatagagacatctgagaccctcagaaaggaaggataatccaagaatataggaaatctgtgttctcttcctttcattttatcccttatatttctaaagactaattataagtaatctgacattttaatgtagctactcttatttattttttctttctgaggtattaaaatatctggactgagttttgccaaatgttaaagggagaagagttactgaagactttgaacacttgctttttgtgattgcttatgtcattagtgcctcatgactgtgtttgatgtcctttattgatacaaagtgagcctgtgccttcattatcttgcccattttaatacaaatggaaacctggtgtttgaaaatctctgaactgtgtgggttttggaggaatatacctgaattttattcaataacagtttctggacaggaagaaaaatacagttacatatttataaaatagtcgttatcagtaaaaaaaaaaaaaaaaaaaaaaaaa

SEQ ID NO: 352 - DNA, 3837 bp, Homo sapiens
gccgggctgaggagccgggagtccgccgcgccggctcggggctgcgggatggggagttagcgccacggcggcggcagtggccgcagcgcaccccgccgccgcccaggagcccgtccagccaggggtgccgggcccgcccagcccgccccggagccaggcccgcgggcggcggcggagctgggcaggtggatgcggctggaagatggcgccctcgggcccgggcagcagcgccaggcggcggtgccggcgggtgctgtactggatcccggtggtgttcatcaccctcctgctcggctggtcctactacgcctacgccatccagctgtgcatagtgtccatggaaaacactggcgaacaagttgtgtgcctgatggcctatcatctactttttgcaatgtttgtctggtcatactggaaaactatctttacattaccaatgaatccttcaaaagaattccatctctcttatgcagagaaagatttgttggagagagagccaagaggagaagcccatcaggaagttcttaggcgagcagccaaggatcttcccatctataccaggaccatgtctggagccatccgatactgtgacagatgccaacttataaaaccagatcgctgccatcactgctccgtctgtgataaatgtattttgaagatggatcatcattgtccatgggtgaacaattgtgttggattttcaaattataagttctttctccttttcttggcttattctctgctctactgcctttttattgcggcaacagatttacagtattttatcaaattttggacaaatggcctacctgatactcaagccaagttccatattatgtttttattctttgctgcagctatgttttctgtcagcttgtcttctctgtttggctatcattgttggctagtcagcaaaaataaatctacattagaggcattcagaagtccagtatttcgacatggaacagataagaatggattcagcttgggtttcagtaaaaacatgcgacaagtttttggtgatgagaagaagtactggttgctacccattttttcaagtctaggtgatggctgctcctttccaacttgccttgttaaccaggatcctgaacaagcatctactcctgcagggctgaattccacagctaaaaatctcgaaaaccatcagtttcctgcaaagccattgagagagtcccagagccaccttcttactgattctcagtcttggacggagagcagcataaacccaggaaaatgcaaagctggtatgagcaatcctgcattaaccatggaaaatgagacttaactcttcaagcaagataaattcatactttataaaagtatcaatgctgtagatggatggaagaggcttcccacaggaaggtgccaccagtcagttgtgcctatgtccctttggctggaaatgcagaatatgaattgattagttctctccaagccattgcttaaaatataacatgttttggatccaatacacacattgttacaactaacacaaattcctattaaatattaaaagtagttctggtttattaatcaacggggaaaacatcttctccaaaaaacttggaataaatccaaggaccagtttttacccaaatatatgggtagcacagtttatcacatagaaactccattaatcatctgattttccgaatctgaaaattgagactattaagatattaagatttcagagatttcaagtcacattataatgataagcattattcataaaacttgttacctttaagaaggtggaagtggcaaaccatacttctttttttttcctctgatgtgaatccagcctcagactgagtgaactgtaataattatgaattcattacagagtccaggtggcctgcagttgaagatcatcaaccatttttgcctcacttaattccagccttttgttttctgctggaaaataagtgtggacattgaagcttgagctctcaaagcagttggctggaatacttttgtcagaatacggtacatttctattacatcagaaatatattttcatctcttcttgttaaattgggaggaaatttatgatagcaattatgaagattgttttatgacattcttttgtcagtttggctttctaaaaatctctttttagattatttctcctgttgaacatagtaaaactattgaatttctcttaagaattcctaataggtcaatagatttaccctccagtgatatctatattatttctttctcgtctcatcaaaatgatgacaggtaaactatatttttccttaaacacctattacagttaaattatgcaaatcattaaataaaaatcatacaacttttggaaagttagttcaacatgaactaaaatggcatgctatttggaaatttagtttgagataaactaaagtgtgttgatgccagaatgttcagcttcagtaaatataataagctcttgtgccttgtatgcactatttaaaaaaagttttttttatttgagtccagtataattcatgtaaatgttaacaattagaataatactctgtatgcttttttgatactgattttgagaatttaaagcagattaccttttaaaactggaccaactaagtaattggtatttaatcaaagagaaaatggtaataaacttttcaaaatctttgttaaaccaaacattcaacacaaaataaactagaaggccagaggataatggaataaaagatcattgcaattacttatccttcctaaaaatatagttttatattaattgtgcttatggaagaaacaatgtcagccaagtccattttatagtttgagtgcaattctttgaacaatagaaatatctgcagtctttcacagatttgtattatgctgaagagtttcatctgacaatctgcttcaagaaatctcagaaaatatgataacattttaactttcgttttagagcacgttttggtcatttttaaaaatacctaaagtgccagaccggaacctatagctactgctagaagtcttaaaaaaaccaacagcagcacaggatgtattaagaattatatgaagtcaggtttgtttttttttttttttttttcaaagcacagtactgttagctgtttttgtggacaggattcgattaagtattccctcttgtcaaactggaagctaggggaaaaagagggatttttatcctttactcttctagagtactgttaatgcccctttcccacagtcttttatataattaaatatatgtcaatacacattagaatcagatttgaaaaagttaaaacaatttcattgttgtaattgttccctttctgttttcatatagtgaataacctttaaagggttgttttgttttgttttgaattataggagttataatctttggagatgattgcatatctcattagatatgcaatataaatttatctgagtgaacaaagtgctaaataaatagatctacattttgtacatatttatataaaatttacctttaagtatttactttaaaaaatttaatggcttaactcgaacttgaagacacatacttcaactgtccttattgtccattaaactgataattttgatttttcttgcttttatagattttactatataggaatcaagatttaagaaattttgcattaaaaatagtgtaccaatgcttcatatacgttagttatttgctattatgtagggaagaggattgttatttcaaagatatattaaagaacagttgcatctgaatataatcatgatgcattcaatgaagttcatatccatgaattcactcctaatataccctaataaagtggttgaaaccgaaaaaaaaaaaaaaaa

SEQ ID NO: 353 - DNA, 2343 bp, Homo sapiens
atacgactacacctgctccggagcccgcggcggtacctgcagcggaggagctctgtcttccccttcatctcacgcgagcccggcgtcccgccgcgtgcgccccggcgcagcccgccagtccgcccggagcccgcccagtcgccgcgctgcacgcccggggtgaaccctctgccctcgctgggacagagggccccgcagccgtcatgctttccgccatctacacagtcctggcgggactgctgttcctgccgctcctggtgaacctctgctgcccatacttcttccaggacataggctacttcttgaaggtggccgccgtgggccggagggtgcgcagctacgggcagcggcggccggcgcgcaccatcctgcgggcgttcctggagaaagcgcgccagacgccacacaagccttttctgctcttccgcgacgagactctcacctacgcgcaggtggaccggcgcagcaatcaagtggcccgggcgctgcacgaccacctcggcctgcgccagggagactgcgtggcgctccttatgggtaacgagccggcctacgtgtggctgtggctggggctggtgaagctgggctgtgccatggcgtgcctcaattacaacatccgcgcgaagtccctgctgcactgcttccagtgctgcggggcgaaggtgctgctggtgtcgccagaactacaagcagctgtcgaagagatactgccaagccttaaaaaagatgatgtgtccatctattatgtgagcagaacttctaacacagatgggattgactctttcctggacaaagtggatgaagtatcaactgaacctatcccagagtcatggaggtctgaagtcactttttccactcctgccttatacatttatacttctggaaccacaggtcttccaaaagcagccatgatcactcatcagcgcatatggtatggaactggcctcacttttgtaagcggattgaaggcagatgatgtcatctatatcactctgcccttttaccacagtgctgcactactgattggcattcacggatgtattgtggctggtgctactcttgccttgcggactaaattttcagccagccagttttgggatgactgcagaaaatacaacgtcactgtcattcagtatatcggtgaactgcttcggtatttatgcaactcaccacagaaaccaaatgaccgtgatcataaagtgagactggcactgggaaatggcttacgaggagatgtgtggagacaatttgtcaagagatttggggacatatgcatctatgagttctatgctgccactgaaggcaatattggatttatgaattatgcgagaaaagttggtgctgttggaagagtaaactacctacagaaaaaaatcataacttatgacctgattaaatatgatgtggagaaagatgaacctgtccgtgatgaaaatggatattgcgtcagagttcccaaaggtgaagttggacttctggtttgcaaaatcacacaacttacaccatttaatggctatgctggagcaaaggctcagacagagaagaaaaaactgagagatgtctttaagaaaggagacctctatttcaacagtggagatctcttaatggttgaccatgaaaatttcatctatttccacgacagagttggagatacattccggtggaaaggggaaaatgtggccaccactgaagttgctgatacagttggactggttgattttgtccaagaagtaaatgtttatggagtgcatgtgccagatcatgagggtcgcattggcatggcctccatcaaaatgaaagaaaaccatgaatttgatggaaagaaactctttcagcacattgctgattacctacctagttatgcaaggccccggtttctaagaatacaggacaccattgagatcactggaacttttaaacaccgcaaaatgaccctggtggaggagggctttaaccctgctgtcatcaaagatgccttgtatttcttggatgacacagcaaaaatgtatgtgcctatgactgaggacatctataatgccataagtgctaaaaccctgaaactctgaatattcccaggaggataactcaacatttccagaaagaaactgaatggacagccacttgatataatccaactttaatttgattgaagattgtgaggaaattttgtaggaaatttgcatacccgtaaagggagacttttttaaataacagttgagtctttgcaagtaaaaagatttagagattattatttttcagtgtgcacctactgtttgtatttgcaaactgagcttgttggagggaaggcattattttttaaaatacttagtaaattaaatgaac

SEQ ID NO: 354 - DNA, 4667 bp, Homo sapiens
gagcgggcgagggagcgcgcgcggccgccacaaagctcgggcgccgcggggctgcatgcggcgtacctggcccggcgcggcgactgctctccgggctggcgggggccggccgcgagccccgggggccccgaggccgcagcttgcctgcgcgctctgagccttcgcaactcgcgagcaaagtttggtggaggcaacgccaagcctgagtcctttcttcctctcgttccccaaatccgagggcagcccgcgggcgtcatgcccgcgctcctccgcagcctggggtacgcgctgaagcccgggaggcttggcgccggcgaagacccaaggaccactcttctgcgtttggagttgctccccacaaccccgggctcgtcgctttctccatcccgacccagccggggcgcggggacaacacaggtcgcggaggagcgttgccattcaagtgactgcagcagcagcggcagcgcctcggttcctgagcccaccgcaggctgaaggcattgcgcgtagtccatgcccgtagaggaagtgtgcagatgggattaacgtccacatggagatatggaagaggaccggggattggtaccgtaaccatggtcagctggggtcgtttcatctgcctggtcgtggtcaccatggcaaccttgtccctggcccggccctccttcagtttagttgaggataccacattagagccagaagagccaccaaccaaataccaaatctctcaaccagaagtgtacgtggctgcgccaggggagtcgctagaggtgcgctgcctgttgaaagatgccgccgtgatcagttggactaaggatggggtgcacttggggcccaacaataggacagtgcttattggggagtacttgcagataaagggcgccacgcctagagactccggcctctatgcttgtactgccagtaggactgtagacagtgaaacttggtacttcatggtgaatgtcacagatgccatctcatccggagatgatgaggatgacaccgatggtgcggaagattttgtcagtgagaacagtaacaacaagagagcaccatactggaccaacacagaaaagatggaaaagcggctccatgctgtgcctgcggccaacactgtcaagtttcgctgcccagccggggggaacccaatgccaaccatgcggtggctgaaaaacgggaaggagtttaagcaggagcatcgcattggaggctacaaggtacgaaaccagcactggagcctcattatggaaagtgtggtcccatctgacaagggaaattatacctgtgtggtggagaatgaatacgggtccatcaatcacacgtaccacctggatgttgtggagcgatcgcctcaccggcccatcctccaagccggactgccggcaaatgcctccacagtggtcggaggagacgtagagtttgtctgcaaggtttacagtgatgcccagccccacatccagtggatcaagcacgtggaaaagaacggcagtaaatacgggcccgacgggctgccctacctcaaggttctcaaggttctcaaggccgccggtgttaacaccacggacaaagagattgaggttctctatattcggaatgtaacttttgaggacgctggggaatatacgtgcttggcgggtaattctattgggatatcctttcactctgcatggttgacagttctgccagcgcctggaagagaaaaggagattacagcttccccagactacctggagatagccatttactgcataggggtcttcttaatcgcctgtatggtggtaacagtcatcctgtgccgaatgaagaacacgaccaagaagccagacttcagcagccagccggctgtgcacaagctgaccaaacgtatccccctgcggagacaggtttcggctgagtccagctcctccatgaactccaacaccccgctggtgaggataacaacacgcctctcttcaacggcagacacccccatgctggcaggggtctccgagtatgaacttccagaggacccaaaatgggagtttccaagagataagctgacactgggcaagcccctgggagaaggttgctttgggcaagtggtcatggcggaagcagtgggaattgacaaagacaagcccaaggaggcggtcaccgtggccgtgaagatgttgaaagatgatgccacagagaaagacctttctgatctggtgtcagagatggagatgatgaagatgattgggaaacacaagaatatcataaatcttcttggagcctgcacacaggatgggcctctctatgtcatagttgagtatgcctctaaaggcaacctccgagaatacctccgagcccggaggccacccgggatggagtactcctatgacattaaccgtgttcctgaggagcagatgaccttcaaggacttggtgtcatgcacctaccagctggccagaggcatggagtacttggcttcccaaaaatgtattcatcgagatttagcagccagaaatgttttggtaacagaaaacaatgtgatgaaaatagcagactttggactcgccagagatatcaacaatatagactattacaaaaagaccaccaatgggcggcttccagtcaagtggatggctccagaagccctgtttgatagagtatacactcatcagagtgatgtctggtccttcggggtgttaatgtgggagatcttcactttagggggctcgccctacccagggattcccgtggaggaactttttaagctgctgaaggaaggacacagaatggataagccagccaactgcaccaacgaactgtacatgatgatgagggactgttggcatgcagtgccctcccagagaccaacgttcaagcagttggtagaagacttggatcgaattctcactctcacaaccaatgaggaatacttggacctcagtcagcctctcgaaccgtattcaccttgttatcctgacccaagatgaaataaaacgtctctcttcccttctttcaggaatacttggacctcagccaacctctcgaacagtattcacctagttaccctgacacaagaagttcttgttcttcaggagatgattctgttttttctccagaccccatgccttacgaaccatgccttcctcagtatccacacataaacggcagtgttaaaacatgaatgactgtgtctgcctgtccccaaacaggacagcactgggaacctagctacactgagcagggagaccatgcctcccagagcttgttgtctccacttgtatatatggatcagaggagtaaataattggaaaagtaatcagcatatgtgtaaagatttatacagttgaaaacttgtaatcttccccaggaggagaagaaggtttctggagcagtggactgccacaagccaccatgtaacccctctcacctgccgtgcgttctggctgtggaccagtaggactcaaggtggacgtgcgttctgccttccttgttaattttgtaataattggagaagatttatgtcagcacacacttacagagcacaaatgcagtatataggtgctggatgtatgtaaatatattcaaattatgtataaatatatattatatatttacaaggagttattttttgtattgattttaaatggatgtcccaatgcacctagaaaattggtctctctttttttaatagctatttgctaaatgctgttcttacacataatttcttaattttcaccgagcagaggtggaaaaatacttttgctttcagggaaaatggtataacgttaatttattaataaattggtaatatacaaaacaattaatcatttatagttttttttgtaatttaagtggcatttctatgcaggcagcacagcagactagttaatctattgcttggacttaactagttatcagatcctttgaaaagagaatatttacaatatatgactaatttggggaaaatgaagttttgatttatttgtgtttaaatgctgctgtcagacgattgttcttagacctcctaaatgccccatattaaaagaactcattcataggaaggtgtttcattttggtgtgcaaccctgtcattacgtcaacgcaacgtctaactggacttcccaagataaatggtaccagcgtcctcttaaaagatgccttaatccattccttgaggacagaccttagttgaaatgatagcagaatgtgcttctctctggcagctggccttctgcttctgagttgcacattaatcagattagcctgattctcttcagtgaattttgataatggcttccagactctttgcgttggagacgcctgttaggatcttcaagtcccatcatagaaaattgaaacacagagttgttctgctgatagttttggggatacgtccatctttttaagggattgctttcatctaattctggcaggacctcaccaaaagatccagcctcatacctacatcagacaaaatatcgccgttgttccttctgtactaaagtattgtgttttgctttggaaacacccactcactttgcaatagccgtgcaagatgaatgcagattacactgatcttatgtgttacaaaattggagaaagtatttaataaaacctgttaatttttatactgacaataaaaatgtttctacagatattaatgttaacaagacaaaataaatgtcacgcaactt

SEQ ID NO: 355 - DNA, 1861 bp, Homo sapiens
actgtggcgtgggagcatctacaaactcctgtggcgagagctgctctgcttccttgggttctacatggcgctgagtgctgcctaccgctttgtgctgaccgaagggcagaagcgctacttcgagaagcttgtgatttattgtgaccagtatgccagcctcatccctgtctccttcgtgcttggcttttatgtgacgctggtggtgaaccgctggtggagccagtacctatgcatgccgctgcccgacgcgctcatgtgcgtggtggcgggcaccgtgcacggacgcgacgaccgcggccgcctctaccggcgcacactcatgcgctacgcagggctctcggccgtgctcatcctgcgctccgtcagcaccgcggtgttcaagcgcttccccaccatagaccacgtggtggaggctgggtttatgacccgcgaggagcgcaagaagtttgaaaacctgaactcatcctacaacaagtactgggtgccctgcgtctggttctccaacctggcggcacaggcccgacgcgagggccgcatccgcgacaacagcgcccttaagctgctgctcgaggagctgaatgtttttcggggcaaatgtggaatgctctttcactatgactggattagcgtacccctcgtgtacacgcaggtggtgaccatcgcactgtacagctacttcctggcttgcctcattggtcgccagttcctggacccggctcagggttacaaagaccacgacctagacctgtgtgtgcccatcttcaccctcttgcagttcttcttctacgccggctggctcaaggtagctgagcagctcatcaaccccttcggagaggacgatgatgactttgagaccaactttctgatcgatagaaacttccaggtgtccatgctggcagtggacgagatgtatgatgacctggctgtgctggagaaggacttgtactgggatgcagccgaggctcgcgccccatacacagcggctactgtcttccagctgcggcagccttccttccagggctccacctttgacatcacgctggccaaagaagacatgcagttccagcggctggacggcttggatggaccgatgggaggggcgcccggcgacttcctgcagcgcctcctgccggcgggcgcgggcatggtcgcgggaggcccgctggggcggcgcctgtcctttctactccgcaagaacagctgcgtgtcggaggcgtctactggggccagctgctcatgcgcggttgtccccgaaggcgcggccccggagtgcagctgcggggacccgctgctcgaccccggcctgccggagcccgaggccccgccccctgcgggtcccgaaccgcttaccctcatccctgggcctgtcgagcccttcagcatcgtgaccatgcccgggccccggggtccggcgccaccctggctgcccagccctattggcgaggaggaggagaatctggcctgagatcttagagcccagccccctaaggacagggaaccaggtccctgcacggcacccacgcaggtgtcccggtctgcataagcctcgtatgcctttgtaaagtccacctacacttttgaccagctctcgctgcccgcatgtgtttggcgctgtgctaggggcgggagttcttccagactcttggaccagcccgccctgaccaccagctctacttcccaacccccactgcctgagaggtctctatcagtgtcctgcctgaattctttccttcaagtgaagatgtgactgactacctcctcgagttgtcatgaggatgaaagaatggcattaaagcatttggtatacagtaggtgctcaataaattgctagtgatttttactcaaaaaaaaaaaaaaaaaa

SEQ ID NO: 356 - DNA, 1349 bp, Homo sapiens
agaaggcctcgcacaaaacactgtacaaacccgaaaggaagtctgagagacgaaccgccttcctccctgaagcttctagaactggagcagaaagaaggtgtggcccagggccagccccgcctcctccccgggcggaagctgtgtcagttgccggaagtcggcgtgaggtggggcttatgcggcggcgtggtgaaatagatatggcgaccgagggggatgtggagctggagttggagactgagaccagtggaccagagcggcctccggagaagccacggaaacatgacagcggtgcggcggacttggagcgggtcaccgactatgcagaggagaaggagatccagagttccaatctggagacggccatgtctgtgattggagacagaaggtcccgggagcagaaagccaaacaggagcgggagaaagaactggcaaaagtcactatcaagaaggaagatctggagctaataatgactgagatggagatatctcgagcagcagcagaacgcagtttgcgggaacacatgggcaacgtggtagaggcgcttattgccctaaccaactgatgcgtgctttctcaaatatacctactggattaatttatggcaataaaatttttttttgtctttttcagttttatcatcttgggtcaagtagagtgtatactatatcctatgttgtggagaatttatatgttggagactaactgaatttaagtgacccattaaaatctagcacacctgtatgaaaaatcagtgtagaagaatacctcatgtgcagatgctaggtggcaggccagtctcattcatctgactagctctcaacagtattcaaggtacatctggagtctcagcagagttactgtactcaaatggcatgtgtctccaagacagcttatgaatatctaaaaggccagctacctgcctaggagccactatatatatagatagatgtaggttatgaacccagttcataggccaccttgagttagaattttggtacctacaacatgcttgattttgagtgattaaaaaaaaataatttggctgggtgctgtggctcacgcctctaatcccagcactttgggaggtcgaggcaggtagatcacgaggtcaggaattcaagaccagcctggccaacatgtgaaaccccgtctccactgaaaatagaaaaattagctgggcatggtggtgggcgcctataatcccagctattctggaggctgaggcaggaatcgcttgaaattggaaagcagaggttgcagtgagctgagatcacactactgtactactgtactccagcctgggggaaagagtgaaactccatctcaaaaaaaaaaaaaaaaaaaa

SEQ ID NO: 357 - DNA, 3664 bp, Homo sapiens
gcgctaggtagagcgccgggacctgtgacagggctggtagcagcgcagaggaaaggcggcttttagccaggtatttcagtgtctgtagacaagatggaatcatctccatttaatagacggcaatggacctcactatcattgagggtaacagccaaagaactttctcttgtcaacaagaacaagtcatcggctattgtggaaatattctccaagtaccagaaagcagctgaagaaacaaacatggagaagaagagaagtaacaccgaaaatctctcccagcactttagaaaggggaccctgactgtgttaaagaagaagtgggagaacccagggctgggagcagagtctcacacagactctctacggaacagcagcactgagattaggcacagagcagaccatcctcctgctgaagtgacaagccacgctgcttctggagccaaagctgaccaagaagaacaaatccaccccagatctagactcaggtcacctcctgaagccctcgttcagggtcgatatccccacatcaaggacggtgaggatcttaaagaccactcaacagaaagtaaaaaaatggaaaattgtctaggagaatccaggcatgaagtagaaaaatcagaaatcagtgaaaacacagatgcttcgggcaaaatagagaaatataatgttccgctgaacaggcttaagatgatgtttgagaaaggtgaaccaactcaaactaagattctccgggcccaaagccgaagtgcaagtggaaggaagatctctgaaaacagctattctctagatgacctggaaataggcccaggtcagttgtcatcttctacatttgactcggagaaaaatgagagtagacgaaatctggaacttccacgcctctcagaaacctctataaaggatcgaatggccaagtaccaggcagctgtgtccaaacaaagcagctcaaccaactatacaaatgagctgaaagccagtggtggcgaaatcaaaattcataaaatggagcaaaaggagaatgtgcccccaggtcctgaggtctgcatcacccatcaggaaggggaaaagatttctgcaaatgagaatagcctggcagtccgttccacccctgccgaagatgactcccgtgactcccaggttaagagtgaggttcaacagcctgtccatcccaagccactaagtccagattccagagcctccagtctttctgaaagttctcctcccaaagcaatgaagaagtttcaggcacctgcaagagagacctgcgtggaatgtcagaagacagtctatccaatggagcgtctcttggccaaccagcaggtgtttcacatcagctgcttccgttgctcctattgcaacaacaaactcagtctaggaacatatgcatctttacatggaagaatctattgtaagcctcacttcaatcaactctttaaatctaagggcaactatgatgaaggctttgggcacagaccacacaaggatctatgggcaagcaaaaatgaaaacgaagagattttggagagaccagcccagcttgcaaatgcaagggagacccctcacagcccaggggtagaagatgcccctattgctaaggtgggtgtcctggctgcaagtatggaagccaaggcctcctctcagcaggagaaggaagacaagccagctgaaaccaagaagctgaggatcgcctggccaccccccactgaacttggaagttcaggaagtgccttggaggaagggatcaaaatgtcaaagcccaaatggcctcctgaagacgaaatcagcaagcccgaagttcctgaggatgtcgatctagatctgaagaagctaagacgatcttcttcactgaaggaaagaagccgcccattcactgtagcagcttcatttcaaagcacctctgtcaagagcccaaaaactgtgtccccacctatcaggaaaggctggagcatgtcagagcagagtgaagagtctgtgggtggaagagttgcagaaaggaaacaagtggaaaatgccaaggcttctaagaagaatgggaatgtgggaaaaacaacctggcaaaacaaagaatctaaaggagagacagggaagagaagtaaggaaggtcatagtttggagatggagaatgagaatcttgtagaaaatggtgcagactccgatgaagatgataacagcttcctcaaacaacaatctccacaagaacccaagtctctgaattggtcgagttttgtagacaacacctttgctgaagaattcactactcagaatcagaaatcccaggatgtggaactctgggagggagaagtggtcaaagagctctctgtggaagaacagataaagagaaatcggtattatgatgaggatgaggatgaagagtgacaaattgcaatgatgctgggccttaaattcatgttagtgttagcgagccactgccctttgtcaaaatgtgatgcacataagcaggtatcccagcatgaaatgtaatttacttggaagtaactttggaaaagaattccttcttaaaatcaaaaacaaaacaaaaaaacacaaaaaacacattctaaatactagagataactttacttaaattcttcattttagcagtgatgatatgcgtaagtgctgtaaggcttgtaactggggaaatattccacctgataatagcccagattctactgtattcccaaaaggcaatattaaggtagatagatgattagtagtatattgttacacactattttggaattagagaacatacagaaggaatttaggggcttaaacattacgactgaatgcactttagtataaagggcacagtttgtatatttttaaatgaataccaatttaattttttagtatttacctgttaagagattatttagtctttaaattttttaggttaattttcttgctgtgatatatatgaggaatttactactttatgtcctgctctctaaactacatcctgaactcgacgtcctgaggtataatacaacagagcactttttgaggcaattgaaaaaccaacctacactcttcggtgcttagagagatctgctgtctcccaaataagcttttgtatctgccagtgaatttactgtactccaaatgattgctttcttttctggtgatatctgtgcttctcataattactgaaagctgcaatattttagtaataccttcgggatcactgtcccccatcttccgtgttagagcaaagtgaagagtttaaaggaggaagaagaaagaactgtcttacaccacttgagctcagacctctaaaccctgtatttcccttatgatgtcccctttttgagacactaatttttaaatacttactagctctgaaatatattgatttttatcacagtattctcagggtgaaattaaaccaactataggcctttttcttgggatgattttctagtcttaaggtttggggacattataaacttgagtacatttgttgtacacagttgatattccaaattgtatggatgggagggagaggtgtcttaagctgtaggcttttctttgtactgcatttatagagatttagctttaatattttttagagatgtaaaacattctgctttcttagtcttacctagtctgaaacatttttattcaataaagattttaattaaaatttgaaaaaaaaaaaaaaaaa

SEQ ID NO: 358 - DNA, 2145 bp, Homo sapiens
aataaatggagtttcaaaatcacaagcttctttcccacatgaacataagactaggagcacatatggaagagtaaagttgaagggaatttggatgatgatttggcaagatgctgtaagtggattaggcaaggctgctaaagagagacaggaaatggctgtgttagtgcttcggacctccgttagaagtagcagttcatggtgttgaaggtttgttgttgaaaataccttcctgaggcacctcttcattgtgcttattcttcccacaacattgtgccaagacactgtcaagcctgggcctgtcaaagcctgggatgtcaaaggcctgggtctttctcatcctgctgtaatgtattgatagctgggggctctgcagaaggacaagggaaaggtgggatagtaacatctttttgagggaagaattggcttcctttcttgaaagtggtgaaggtacagcatatagctgcatggaagaaacagtaatcggatggctaccttctacattttgtattaggaaacaaagtccattgtaagagtccatgttgatcttggaaatagaaggattgaaaaaagctaaatttccacaaagaacaagaacttgaccatctcctttttgatctgaagactaggggacaatggatatcatagagacagcaaaacttgaagaacatttggaaaatcaacccagtgatcctacgaacacttatgcaagacccgctgaacctgttgaagaagaaaacaaaaatggcaatggtaaacccaagagcttatccagtgggctgcgaaaaggcaccaaaaagtacccggactatatccaaattgctatgcccactgaatcaaggaacaaatttccactagagtggtggaaaacgggcattgccttcatatatgcagttttcaacctcgtcttgacaaccgtcatgatcacagttgtacatgagagggtccctcccaaggagcttagccctccactcccagacaagttttttgattacattgatagggtgaaatgggcattttctgtatcagaaataaatgggattatattagttggattatggatcacccagtggctgtttctgagatacaagtcaatagtgggacgcagattctgttttattattggaactttatacctgtatcgctgcattacaatgtatgttactactctacctgtgcctggaatgcatttccagtgtgctccaaagctcaatggagactctcaggcaaaagttcaacggattctacgattgatttctggtggtggattgtccataactggatcacatatcttatgtggagacttcctcttcagcggtcacacggttacgctgacactgacttatttgttcatcaaagaatattcgcctcgtcacttctggtggtatcatttaatctgctggctgctgagtgctgccgggatcatctgcattcttgtagcacacgaacactacactatcgatgtgatcattgcttattatatcacaacacgactgttttggtggtaccattcaatggccaatgaaaagaacttgaaggtctcttcacagactaatttcttatctcgagcatggtggttccccatcttttatttttttgagaaaaatgtacaaggctcaattccttgctgcttctcctggccgctgtcttggcctcctggctgcttcaaatcatcatgcaaaaagtattcacgggttcagaagattggtgaagacaatgagaaatcgacctgaggagcaaaacaaaggcatcagctcttacaccaaaagagttaacgctgtaaccaaaggtatagttttgttttttattttaggagaactgactggtaaatgaagaaatggaccaaattttgtgtaaacgattagaaagatgaacaaagtattgccctttgactggttttcttcttcatcctgagaaagatacattctcttgcagctcttcattcattggtgacaagcccccaccccgggactttactaatgagcttgttaaagaggtgccaaagaacatattcctcctttctttattctttctccaccaaaaccctctacttcagaattttttcaggatatttttcagcccaaggtcagaagaatgtgttaatattttaaataaaatatctggacatctacaaaaaaaaaaaaaaaa

SEQ ID NO: 359 - DNA, 4669 bp, Homo sapiens
tttttattattgctgttattgaggttgagggagaagagatcggtctaaattctggctgggtaagtggggggattctcggcgatgagaaacgggggacttagaagccggaggaaaatcagcagccccacatctccacttctccagtccgccctactctccacccgtgacctccagtggagaccccaggcggcagcatcagtatttgatcggcccttcgtcagcacgctgccagccctggccggctgggttcgccaggcatcacccgctcggctctgaagcggacgcctggccctgcaccgggctttggaaggaccctctctgcgctcgccccctccccagggtggctccgctttcgagcccgggcgcggcgcccaccatgcgcggctgcctgcggctcgcgctgctctgcgcgctgccctggctcctgctggcggcgtcgcccgggcacccggcgaaatcccccaggcagcccccggcaccgcgccgcgaccccttcgacgctgccaggggcgccgatttcgatcatgtctacagcggggtggtgaacctcagcaccgagaacatctactctttcaactacaccagccagcccgaccaggtgacagccgtgagggtgtatgtgaacagttcctctgagaatctcaactacccggtccttgttgtggttcgccagcagaaagaggtgctgtcctggcaggttcctctgctcttccaaggactataccagaggagctacaattatcaagaagtgagccgcaccttatgtccctcagaagcaaccaatgagacgggacccttgcagcaactgatatttgtagatgtcgcatccatggcacccctgggtgctcagtacaaactgctagttaccaagctgaagcacttccagctccggacaaatgttgcctttcactttactgccagcccctctcaacctcagtattttctatacaagtttcccaaagacgtggactcagttatcattaaagtggtgtctgaaatggcttatccatgttctgttgtctcagtccagaatatcatgtgcccggtgtatgatctcgaccacaatgtggaatttaatggtgtctatcagtccatgaccaagaaagctgccatcacgctacagaagaaggattttccaggcgagcagttcttcgtggtatttgtgataaagcctgaagattatgcctgtggaggatctttcttcatccaggaaaaggaaaaccagacctggaatctacagcgaaaaaagaaccttgaagtgaccattgtcccttccattaaagaatctgtttatgtgaaatccagtcttttcagtgtcttcatcttcctgtccttctacttgggatgccttcttgttgggtttgttcattatctgaggtttcagagaaaatccattgatggaagctttgggtccaatgatggctctggaaatatggtggcatctcatcccattgctgccagcacacccgaagggagcaattatgggacaatagatgagtcaagctccagtcctggaaggcagatgtcctcctccgatggtgggccaccgggccagtcagacacagacagctccgtggaggagagcgacttcgacaccatgccagacattgagagtgataaaaacatcatccggaccaagatgttcctttacctgtcagatttgtccaggaaggaccggagaattgtcagcaaaaaatataaaatttatttttggaacatcatcaccattgctgtgttttacgcgctgcccgtgatccagctggtcattacctatcagacagtggtaaatgtcactggcaaccaggacatctgttactacaacttcctctgtgctcaccccttgggcgtcctgagtgccttcaacaacattctcagcaatctgggccacgtgcttctgggcttcctcttcctgctgatagtcttgcgccgcgacatcctccatcggagagccctggaagccaaggacatctttgctgtggagtacgggattcccaaacactttggtctcttctacgctatgggcattgcattgatgatggaaggggtgctcagtgcttgctaccatgtctgccctaattattccaacttccgattcgacacctccttcatgtacatgatcgctggcctgtgcatgctgaagctctatcagacccgccacccagacatcaatgccagcgcctactctgcctatgcctcctttgctgtggtcatcatggtcaccgtccttggagtggtgtttggaaaaaatgacgtatggttctgggtcatcttctctgcaatccacgttctggcctcgctagccctcagcacccagatatattatatgggtcgtttcaagatagatttgggaattttccggcgggctgccatggtgttctacacagactgtatccagcagtgtagccgacctctatatatggatagaatggtgttgctggttgtggggaatctggttaactggtccttcgccctctttggattgatataccgccccagggactttgcttcctacatgctgggcatcttcatctgtaaccttttgctgtacctggccttttacatcatcatgaagctccgcagctctgaaaaggtcctcccagtcccgctcttctgcatcgtggccaccgctgtgatgtgggctgccgccctatattttttcttccagaatctcagcagctgggagggaactccggccgaatcccgggagaagaaccgcgagtgcattctgctggatttcttcgatgaccatgacatctggcacttcctctctgctactgctctgtttttctcattcttggttttgttaactttggatgatgaccttgatgtggttcggagagaccagatccctgtcttctgaacctccaacattaagagaggggagggagcgatcaatcttggtgctgtttcacaaaaattacagtgaccacagcaaagtaaccactgccagatgctccactcaccctctgtagagccaactctgcattcacacaggaaggagaggggctgcgggagatttaaacctgcaagaaaggaggcagaaggggagccatgttttgaggacagacgcaaacctgaggagctgagaaacacttgctccttccatctgcagctttgggagtgcaacagggataggcactgcatccaagtcaactcaccatcttggggtccctcccaccctcacggagacttgccagcaatggcagaatgctgctgcacacttccctccagttgtcaccctgcccagaaaggccagcagcttggacttcctgcccagaaactgtgttggcccccttcacacctctgcaacacctgctgctccagcaagaggatgtgattctttagaatatggcggggaggtgaccccaggccctgccctactgggatagatgttttaatggcaccagctagtcacctcccagaagaaactctgtacatttcccccaggtttctgatgccatcagaagggctcaggagtggggtttgtcacacattcctcttaacaagtaactgtcactgggaccgagtcctgggtgcttacatattccttcgtgtcttcatctcactgacctgtgtggacctcatcactctgactctgccttcttggaaaggccctgtcactccacagatgtctggccagcttcaaggcagaaggaaaaacaggaaaagctcttttaacagcagcaggaacaagagaaatgactaaccatactaaaagactggtaacagcagcagcagccagacaggcctcaccttaaggacttgggctgccagagcaaattcagcagagcttatttggcctcccattcacacagctcagttctgtgcccacatcacctttggggaagaaatcagcattctaatcagggacactacttcaggagtcctccacagcgagtccgtcatctgtcactttatgtagatcagggttctagacttcttccctgaggttctcagaagcagctctcaggatgaacgtattgtcctcttcccctcttcttgcaaagtgcacagctaatctaatgttgtctctcggttgcacctgacattctctccccagtaaggtgttggcaagctcagcatctgggttccactctcacactgtctggcagctctgtgtctgagaagttctacattgaccaggcccccttgttgcctggagtatgacgtaatcagaaaatagacgtataaatgtgcacatgcgtatgtatttgcttgtgaaattaaagtcacctcttgcctctgctttcctgatcattcgttagagaaatggatcaggcatttttttaaattattattctttctctaaactatttgcattgtgttcaaaaacccattttagaagtttgaacagcaagcttttcctgattttaaaaacacaaagttgctttcaatgaaatattttgtgatttttttaaagtccccaaatgtgtacttagccttctgttattccttattctttaagcagtgttggcttccattgaccatatgaaggccaccaattaaatggttgtgttaatccaacatgtaaaaaactttttggcagggcacagtggctcacgcctgtaatcccaaagtgctggaatttacaggtaggaccaccacacttggtccacttacttataataaacattgatttggtcgttaaaaaaaaaaaaaaaaaaaaaaa

SEQ ID NO: 360 - DNA, 986 bp, Homo sapiens
tcacgtgacccgggcgcgctgcggccgcccgcgcggacccggcgagaggcggcggcgggagcggcggtgatggacgggtccggggagcagcccagaggcggggggcccaccagctctgagcagatcatgaagacaggggcccttttgcttcagggtttcatccaggatcgagcagggcgaatggggggggaggcacccgagctggccctggacccggtgcctcaggatgcgtccaccaagaagctgagcgagtgtctcaagcgcatcggggacgaactggacagtaacatggagctgcagaggatgattgccgccgtggacacagactccccccgagaggtctttttccgagtggcagctgacatgttttctgacggcaacttcaactggggccgggttgtcgcccttttctactttgccagcaaactggtgctcaaggctggcgtgaaatggcgtgatctgggctcactgcaacctctgcctcctgggttcaagcgattcacctgcctcagcatcccaaggagctgggattacaggccctgtgcaccaaggtgccggaactgatcagaaccatcatgggctggacattggacttcctccgggagcggctgttgggctggatccaagaccagggtggttgggacggcctcctctcctactttgggacgcccacgtggcagaccgtgaccatctttgtggcgggagtgctcaccgcctcgctcaccatctggaagaagatgggctgaggcccccagctgccttggactgtgtttttcctccataaattatggcatttttctgggaggggtggggattgggggacatgggcatttttcttacttttgtaattattggggggtgtggggaagagtggtcttgagggggtaataaacctccttcgggacacaaaaaaaaaaaaaaaaaaaaaaaaaaaaaaaaaaaaaaaaaaaaaaaaaaaaaaaaaaaaaaaaaaaaaaaaaaaaaaa

SEQ ID NO: 361 - DNA, 4617 bp, Homo sapiens
ctccatctttctagtccccaccttccccggtgcagacacccggcgaagcccacccggttttcccagcggcatttccgatgacagcttcggggctacgtgtcctgtgctgtcggagacgcacaggaagcaaagtttgtgagaagccttgggggcgactttgccttgggcacccgcatttgtgcgtctgcgaggtgcctcggtgtgcgcggagctagtttcccagtttcccgggcccctcccttctccgagcccctctagcgatttgtttaggaaaagtgatgacatgaactagtagtggagaatcgcagcgccgctccccgccctggggagggaggggagccccggagagcctgccggtgggagctggaagcaggctcccggctgagcgccccagcccgaaaggcagggtctgggtgcgggaagagggctcggagctgccttcctgctgccttggggccgcccagatgagggaacagcccgatttgcctggttctgattctccaggctgtcgtggttgtggaatgcaaacgccagcacataatggaaacaggacctgaagacccttccagcatgccagaggaaagttcccccaggcggaccccgcagagcattccctaccaggacctccctcacctggtcaatgcagacggacagtacctcttctgcaggtactggaaacccacaggcacacccaaggccctcatctttgtgtcccatggagccggagagcacagtggccgctatgaagagctggctcggatgctgatggggctggacctgctggtgttcgcccacgaccatgttggccacggacagagcgaaggggagaggatggtagtgtctgacttccacgttttcgtcagggatgtgttgcagcatgtggattccatgcagaaagactaccctgggcttcctgtcttccttctgggccactccatgggaggcgccatcgccatcctcacggccgcagagaggccgggccacttcgccggcatggtactcatttcgcctctggttcttgccaatcctgaatctgcaacaactttcaaggtccttgctgcgaaagtgctcaaccttgtgctgccaaacttgtccctcgggcccatcgactccagcgtgctctctcggaataagacagaggtcgacatttataactcagaccccctgatctgccgggcagggctgaaggtgtgcttcggcatccaactgctgaatgccgtctcacgggtggagcgcgccctccccaagctgactgtgcccttcctgctgctccagggctctgccgatcgcctatgtgacagcaaaggggcctacctgctcatggagttagccaagagccaggacaagactctcaagatttatgaaggtgcctaccatgttctccacaaggagcttcctgaagtcaccaactccgtcttccatgaaataaacatgtgggtctctcaaaggacagccacggcaggaactgcgtccccaccctgaatgcattggccggtgcccggctcatggtctgggggatgcaggcaggggaagggcagagatggcttctcagatatggcttgccaaaaaaaaaaaaaaaaaaaaatcagaaattggagaaatccttagcacaattttctaaaaaataacagacatttttgttatacattagactatcagacactggacctaccttaatggttagacactttatgcaaaaaaagagaaaggtcccaggtgattttccacaaagaatgtgctaaaatgtccactgaaaacaaagccaagcctctgccctgcctctcccagctcccacaagggttccaggaattcctggtgttcccaggacaccagactgcaataactggaggcgcctccttcctgcccacccttcgctcacgccccagcgccctctctgaccagcctccgcttggtggccttcctctggccgtgtgatgaggtggttgctgtctccataggggccagctccccagggcagactcacgtgcccctctgaggctcagaaaatgcccagcccttcctcaaaatgagcagccacccatgactttgtgggctccttgttagcctgagaccaggctttgcagaggggcggggggtgaggcttagcccagaaggagaactgagcaggaaaccaaggctcttctctgtcccctgcccttcccctcctgccagggggaggctcaggttggtccccgagtgccgcctgtactcacaaaggctgcctttcctctagagtcactaattttacctgatgctatgagagaatcatattgaagatgaaatgtctaatatataatgtatattttaaagcagagactattttggtggataggtgggagggagcaaggggagtttgagggaatcagagcttgatgctactgtacagaactggacaggttgggccggcagtggtggggccagagggctctgtgctctaggagctaagccagcagcccccgagaggggacttggctgggcctttcctatgggcaaggcccagtgctcttcctgcccaccagggaccatggagcagtggcaccctatggggctatgatccctaggcctgggcctgggcctgcctatggcccagagctaccctgggagtgtcagtgctagcagcacagctacctctggtggcaggagaagagaggcccagcacagcagcaggccaggccttcctgtccaggtctgcatggagcactcggtgacccagagcagggactggaggcacccccagccctgccccaggccacagcaggacaggccgggacaggcctcacccaaggccaaggctggcatcagccaatcattcagagctgaggccctgggcctagcctgcccttctcaggtgccaataccaccccagccctgcccttggcctcactttttcccagcaataagtggggttcaccacccgcctcgggaatactttccccttctaaatgggacttgctgttacctcaggaggctccttagtgcaaatatgaccctggtcagggctttgccaccgttgaagccctgcagaaggtgcaatgtaggggttctggggccacagaggagaggccacttcccaccaggacccccaacatgaagtctaggcctcaggggctcccgcccttcttcctccagcagcgggaactgccactgctctcccaggccctgttctggaggctaaccttggttcctggagagtgtgcccctccaccctccctccagcagccctgatcacaccatgagagccaggaacgggtcaccctgctgaagatcactctgtgccctgggggaggagccaagccctcaccccacaaggggcaggtgggggcttggttgctgacccggcccaagtccccacagagcaccttctgtagctccagcttgtctccctggcttctctttgaaggagaaaaatgtaaaatatgcactgagaaagccagccccgcctgcttagtcagccccggcagcagggcagccatgggaactcaggaaaagcaggaaccctttccaaaagcccagagatgccctgggctcagatctgtaattctcccaggagctgtgatagagcaggccacacaaagtccctacgcctccctgctgcctcccccagatgcatgtggtggcatcaccattccccaaattgaatatcagcatgcggcctgaccagggactctttagatgcatgaatttatttatatgaaggctctcacagagacacacacagcacttcagtagcatttgcattcctggttaaagaatcaccaatatttaaaataaaaactttcctgaaattgggactgtcatgttatccagaagggctggtacatccgcccaccatgtccccctgctgggtcaggagccaacacaggaccctgcgtgtgagcgtgcctgacatctcacgcacggccactccagagccggtccctgtccttggaaagctgtgaagccttgcgttgagttccttctcgatactgacggctccgtgctgacattctgagctctggagtcacaccagcgcaggggcgtggaggaactgaggtttggaaggaatgccaggtctcgcacagcttggcctcgagaaggtgagaggaaggcaaaggccagggaggggacccagagaggcctggcacacaaggcccaagcaccaccgtcaacacagcccagtccatacagaaatgggtttcatgcctgaaaagctttttacagaaagatgccgcctgtagccagtgacagccgcaaccctacaggcctcagttccttgcagaggtgaggggtagagagtcagcctccctcccttccagcagcgacccagcttccctccacttccaggtggtgctgggctcaccgagggagcactggtgggtgctctgaaaacccacaggatcccacctccaggcccacctgggtcccatctcactctcttcttctttcaccaattgctaacatagaccttgttgggatcacgatggcttcacaagccagctgttgggtttgctatgtcactgtggctcagtcacatccctgcgtgtatactgtctgcggggcacatatgtatccatttagagctaaaggaatcagtgtacactacagctaatcctaataaatccgatgttttcggaaaaa

SEQ ID NO: 362 - DNA, 1883 bp, Homo sapiens
agttccgcgcggggctgtcggggaaccatggctgccccgagagacaatgtcactttattattcaagttatactgcttggcagtgatgaccctgatggctgcagtctataccatagctttaagatacacaaggacatcagacaaagaactctacttttcaaccacagccgtgtgtatcacagaagttataaagttattgctaagtgtgggaattttagctaaagaaactggtagtctgggtagattcaaagcatctttaagagaaaatgtcttggggagccccaaggaactgttgaagttaagtgtgccatcgttagtgtatgctgttcagaacaacatggctttcctagctcttagcaatctggatgcagcagtgtaccaggtgacctaccagttgaagattccgtgtactgctttatgcactgttttaatgttaaaccggacactcagcaaattacagtgggtttcagtttttatgctgtgtgctggagttacgcttgtacagtggaaaccagcccaagctacaaaagtggtggtggaacaaaatccattattagggtttggcgctatagctattgctgtattgtgctcaggatttgcaggagtatattttgaaaaagttttaaagagttcagatacttctctttgggtgagaaacattcaaatgtatctatcagggattattgtgacattagctggcgtctacttgtcagatggagctgaaattaaagaaaaaggatttttctatggttacacatattatgtctggtttgtcatctttcttgcaagtgttggtggcctctacacttctgttgtggttaagtacacagacaacatcatgaaaggcttttctgcagcagcggccattgtcctttccaccattgcttcagtaatgctgtttggattacagataacactcacctttgccctgggtactcttcttgtatgtgtttccatatatctctatggattacccagacaagacactacatccatccaacaaggagaaacagcttcaaaggagagagttattggtgtgtgattttagcctcacgtgagactccttttaagactaaaccatttgcattaaactagagccttaagtcaatctcagaaggtagcataaacaaataaaaattaactgtatggcatgatcagtgcggttatgtggaaacaacaacaaacaaacgaagctatctgagtgaactgctaatacagaaacttaatgtagacctgtttggggtctactattgttttagaatgaaggaattgtattattgtgtgtatatataatttgtaaataaaaagtatggagatgatacggtgttaaaaaaaatcatggtgaggctacaatactcaagtaacaaggtttgggacaatgtctaagggttaaagtgccaaagccatttctgtactaactgttctcttgttccggtaccggggagaaggatgacccctccttattctccaattcatgtacagtattttgtcctagcagcataaagacctagctcttttcttacaagaggcagaaacaagacaggctagttcataaacaaactgaatgtgtaactaacttctcaaaatgaatctatttcataactcggacaatttctgggtggtgactgagtacccctttagtgagtacccctttagtgctatatttgtgccattcattatctggttcatatttctttgctgttagatgatacacatttcttcaaaaaaatttctaatgtcacttttgtacttttttaaataaagtatgtttaactgttgggctctcaataatttgtgaaatttcagtgttttctataatgttaatggggaaattcagcaataaactttatttgcaaaaaaaaaaaaaaaaaaaaaaaaaaaaaa

SEQ ID NO: 363 - DNA, 3133 bp, Homo sapiens
ccgctgaggccgcggcgcccgccagcctgtcccgcgccatggccccgcgcgcccggcggcgccgcccgctgttcgcgctgctgctgctctgcgcgctgctcgcccggctgcaggtggctttgcagatcgctcctccatgtaccagtgagaagcattatgagcatctgggacggtgctgtaacaaatgtgaaccaggaaagtacatgtcttctaaatgcactactacctctgacagtgtatgtctgccctgtggcccggatgaatacttggatagctggaatgaagaagataaatgcttgctgcataaagtttgtgatacaggcaaggccctggtggccgtggtcgccggcaacagcacgaccccccggcgctgcgcgtgcacggctgggtaccactggagccaggactgcgagtgctgccgccgcaacaccgagtgcgcgccgggcctgggcgcccagcacccgttgcagctcaacaaggacacagtgtgcaaaccttgccttgcaggctacttctctgatgccttttcctccacggacaaatgcagaccctggaccaactgtaccttccttggaaagagagtagaacatcatgggacagagaaatccgatgcggtttgcagttcttctctgccagctagaaaaccaccaaatgaaccccatgtttacttgcccggtttaataattctgcttctcttcgcgtctgtggccctggtggctgccatcatctttggcgtttgctataggaaaaaagggaaagcactcacagctaatttgtggcactggatcaatgaggcttgtggccgcctaagtggagataaggagtcctcaggtgacagttgtgtcagtacacacacggcaaactttggtcagcagggagcatgtgaaggtgtcttactgctgactctggaggagaagacatttccagaagatatgtgctacccagatcaaggtggtgtctgtcagggcacatgtgtaggaggtggtccctacgcacaaggcgaagatgccaggatgctctcattggtcagcaagaccgagatagaggaagacagcttcagacagatgcccacagaagatgaatacatggacaggccctcccagcccacagaccagttactgttcctcactgagcctggaagcaaatccacacctcctttctctgaacccctggaggtgggggagaatgacagtttaagccagtgcttcacggggacacagagcacagtgggttcagaaagctgcaactgcactgagcccctgtgcaggactgattggactcccatgtcctctgaaaactacttgcaaaaagaggtggacagtggccattgcccgcactgggcagccagccccagccccaactgggcagatgtctgcacaggctgccggaaccctcctggggaggactgtgaacccctcgtgggttccccaaaacgtggacccttgccccagtgcgcctatggcatgggccttccccctgaagaagaagccagcaggacggaggccagagaccagcccgaggatggggctgatgggaggctcccaagctcagcgagggcaggtgccgggtctggaagctcccctggtggccagtcccctgcatctggaaatgtgactggaaacagtaactccacgttcatctccagcgggcaggtgatgaacttcaagggcgacatcatcgtggtctacgtcagccagacctcgcaggagggcgcggcggcggctgcggagcccatgggccgcccggtgcaggaggagaccctggcgcgccgagactccttcgcggggaacggcccgcgcttcccggacccgtgcggcggccccgaggggctgcgggagccggagaaggcctcgaggccggtgcaggagcaaggcggggccaaggcttgagcgccccccatggctgggagcccgaagctcggagccagggctcgcgagggcagcaccgcagcctctgccccagccccggccacccagggatcgatcggtacagtcgaggaagaccacccggcattctctgcccactttgccttccaggaaatgggcttttcaggaagtgaattgatgaggactgtccccatgcccacggatgctcagcagcccgccgcactggggcagatgtctcccctgccactcctcaaactcgcagcagtaatttgtggcactatgacagctatttttatgactatcctgttctgtgggggggggggtctgttttccccccatatttgtattccttttcataacttttcttgatatctttcctccctcttttttaatgtaaaggttttctcaaaaattctcctaaaggtgagggtctctttcttttctcttttccttttttttttctttttttggcaacctggctctggcccaggctagagtgcagtggtgcgattatagcccggtgcagcctctaactcctgggctcaagcaatccaagtgatcctcccacctcaaccttcggagtagctgggatcacagctgcaggccacgcccagcttcctccccccgactccccccccagagacacggtcccaccatgttacccagcctggtctcaaactccccagctaaagcagtcctccagcctcggcctcccaaagtactgggattacaggcgtgagcccccacgctggcctgctttacgtattttcttttgtgcccctgctcacagtgttttagagatggctttcccagtgtgtgttcattgtaaacacttttgggaaagggctaaacatgtgaggcctggagatagttgctaagttgctaggaacatgtggtgggactttcatattctgaaaaatgttctatattctcatttttctaaaagaaagaaaaaaggaaacccgatttatttctcctgaatctttttaagtttgtgtcgttccttaagcagaactaagctcagtatgtgaccttacccgctaggtggttaatttatccatgctggcagaggcactcaggtacttggtaagcaaatttctaaaactccaagttgctgcagcttggcattcttcttattctagaggtctctctggaaaagatggagaaaatgaacaggacatggggctcctggaaagaaagggcccgggaagttcaaggaagaataaagttgaaattttaaaaaaaaa

SEQ ID NO: 364 - DNA, 5054 bp, Homo sapiens
actcagcctggagaccgaagcgcttcactgagcgctcgccgccgcccagcctctcctctcgcgcctcctagctcttcgcagagcaaccaggagccaggagtggtctagagcccgagggtgggaagggggagtctgtctggcttttctcctatcttgcttctttttcctcttcccttcccactcttgttcaagcgagtgtgtgagctatggagcgaagagcctggagtctgcagtgcactgctttcgtcctcttttgcgcttggtgtgcactgaacagtgcaaaagcgaaaaggcaatttgtcaatgaatgggcagcggagatccccgggggcccggaagcagcctcggccatcgccgaggagctgggctatgaccttttgggtcagattggttcacttgaaaatcactacttattcaaacataaaaaccaccccagaaggtctcgaaggagtgcctttcatatcactaagagattatctgatgatgatcgtgtgatatgggctgaacaacagtatgaaaaagaaagaagtaaacgttcagctctaagggactcagcactaaatctcttcaatgatcccatgtggaatcagcaatggtacttgcaagataccaggatgacggcagccctgcccaagctggaccttcatgtgatacctgtttggcaaaaaggcattacgggcaaaggagttgttatcaccgtactggatgatggtttggagtggaatcacacggacatttatgccaactatgatccagaggctagctatgattttaatgataatgaccatgatccatttccccgatatgatcccacaaacgagaacaaacacgggaccagatgtgcaggagaaattgccatgcaagcaaataatcacaaatgcggggttggagttgcatacaattccaaagttggaggcataagaatgctggatggcattgtgacggatgctattgaggccagttcaattggattcaatcctggacacgtggatatttacagtgcaagctggggccctaatgatgatgggaaaactgtggaggggcctggccggctagcccagaaggcttttgaatatggtgtcaaacaggggagacaggggaaggggtccatcttcgtctgggcttcgggaaacggggggcgtcagggagataattgtgactgtgatggctacacagacagcatctacaccatctccatcagcagtgcctcccagcaaggcctatccccctggtacgctgagaagtgctcctccacactggccacctcttacagcagcggagattacaccgaccagagaatcacgagcgctgacctgcacaatgactgcacggagacgcacacaggcacctcggcctctgcacctctggctgctggcatcttcgctctggccctggaagcaaacccaaatctcacctggcgagatatgcagcacctggttgtctggacctctgagtatgacccgctggccaataaccctggatggaaaaagaatggagcaggcttgatggtgaatagtcgatttggatttggcttgctaaatgccaaagctctggtggatttagctgaccccaggacctggaggagcgtgcctgagaagaaagagtgtgttgtaaaggacaatgactttgagcccagagccctgaaagctaatggagaagttatcattgaaattccaacaagagcttgtgaaggacaagaaaatgctatcaagtccctggagcatgtacaatttgaagcaacaattgaatattcccgaagaggagaccttcatgtcacacttacttctgctgctggaactagcactgtgctcttggctgaaagagaacgggatacatctcctaatggctttaagaactgggacttcatgtctgttcacacatggggagagaaccctataggtacttggactttgagaattacagacatgtctggaagaattcaaaatgaaggaagaattgtgaactggaagctgattttgcacgggacctcttctcagccagagcatatgaagcagcctcgtgtgtacacgtcctacaacactgttcagaatgacagaagaggggtggagaagatggtggatccaggggaggagcagcccacacaagagaaccctaaggagaacaccctggtgtccaaaagccccagcagcagcagcgtagggggccggagggatgagttggaggagggagccccttcccaggccatgctgcgactcctgcaaagtgctttcagtaaaaactcaccgccaaagcaatcaccaaagaagtccccaagtgcaaagctcaacatcccttatgaaaacttctacgaagccctggaaaagctgaacaaaccttcccagcttaaagactctgaagacagtctgtataatgactatgttgatgttttttataacactaaaccttacaagcacagagacgaccggctgcttcaagctctggtggacattctgaatgaggaaaattaaaataagtgtgtggtcccaagttggaaatattcatgcttcttccttaccctgcgattttgcctgtgtctgaagtggttgttttgtcatgaattcttatgcttataatatcctttgtggcaccttttctttttctccctaaactgtacatgtgaaggggatgagctcaagcaggaagttcaacttccagaattgatcataggtatttcaaaacacatctttcctgtctgcacaagtgaagtgttttgttctttctggagtcacagttgacaaaaagctcttacactacattagaacactgcattagagcccatttcaattctcaaaagaaaaggcaaaacctgggatatcaattaatttgaaaacataatctgcaaagaatgagaaggagtcagaaactgtttctgtagcttgttccctgtcttgtccatgtggttcttcaaattttgatgccaagaaagtatttggtaggcctaatgaaggagttcactgtaagactcattccctagatctttctattccaaagtgccactcattcctgtagtcaaaatctggtcatgttggtcaaaagctggattatttagatctagaaacagatcttgaaatctgaatgctctggtttgagcaattttcgaacattctttgcctggtgcactgtgtctgtggtgccagaggcgtccgtggatccagaggtggttatgactcgtgctgcatgcctggtctttcctctgtttctccttctgaaagttttctatacctgtctcctttctcagccacaaaataaatgttgggagaaatgatatataccactttcccagaaaaaaaaaaacttacacttgggacttggcaaattcctagtcacaatttttttcagcagtaacaggaaaccacttatcacatggagacctaatgtaataatagaaaaatactcataatagggagaaaccaagagaagttttgtttttgtttttttccaactgtgttcattagaacagcgtgttctaagtatttgaaactgaatgtttattccttgatactaaaagttcttctccaatcctatcactgatagtgtccaaattctcaccaaattgctcctaagcttcaaatcagaagcagaaactggcaggccatggaccttaattgtccctcaggtagattttgtttggtatgcagaatgtttttaaaatatgagtggttattgaaaatatgatgtttcacataaaacctcattctcggacccatctttgctcatggcaacagttagctggagctgagtagcagctgcctgattagatgactctcagtccccatggcaccctgctccatgttacctagagcaggcacttgattccttgctgggcagtatccaataggcatttgattttgcccactcctacactaagcgaatgtgtacaaagtgtaaatgcattaggaaaaacaaactacccgcatcttctgttaggcaggatctgtacaataataattatgagtttgcttatgtaatctcacctcacctggatgatcactaatactaattcatttattactaaccttctggcttccttctctcaatatgcttacaaagtctccagtcacctacaatgctggctttctcccactgagtttgctgtttgcaatttttccatgaagtttgaacttcataaggtaattcatggcattgaactggttcatgaaaagaacactagagtctgtcatttgctttggcttgaagtatggttggtaacacaaattttcacctgctcttctaccatttgaatttgtgtagagggtgtttgcagagcaatgcccgtaatgcttagagaatgttctcctaaaagacttgcggaatcactctgtccttggaagtttcatatattgtttgatatgaagtgttagatagaatttccaatattggagcatatcaaaaagtattaaaactaaaaaggaccagagaattcttagattggcccggaaaggccaataaagagttagaatgaaaactcattacttttccattcccaatctagtgctagatgtataaatctttcttttgattcttcctaacaaaatattttctgggttaaaaccccagccaactcattgggttgtagccaaaggttcactctcaagaagctttaatatttaaataaaatcatattgaatgtttccaacctggagtataatattcagatataaaacagttttgtcagtctttcttagtgcctgtgtggatttttgtgaaaatgtcaaagagaaaacttatatactatttcccttgaaattttaaactatattttctttacaggtatttataatataccaatgcttttatcaaacagaattttaaagagcataataaattatattaaagaaccaaaagttttcctgagaataagaaagtttcacccaataaaatatttttgaaaggcatgttcctctgtcaatgaaaaaaagtacatgtatgtgttgtgatattaaaagtgacatttgtctaatagcctaatacaacatgtagctgagtttaacatgtgtggtcttggtattcttaagggaacttccacattatacatttgatgtattgaccagaat

SEQ ID NO: 365 - DNA, 4122 bp, Homo sapiens; identical to SEQ ID NO: 280

SEQ ID NO: 366 - DNA, 642 bp, Homo sapiens
atggcgcccgcgcagcgcccgctgctcccgctgctgctcctgctgttaccgctgccgccgccgcccttcgcgcgcgccgaggacgccgcccgcgccaactcggaccgctacgccgtctactggaaccgcagcaaccccaggttccacgcaggcgcgggggacgacggcgggggctacacggtggaggtgagcatcaatgactacctggacatctactgcccgcactatggggcgccgctgccgccggccgagcgcatggagcactacgtgctgtacatggtcaacggcgagggccacgcctcctgcgaccaccgccagcgcggcttcaagcgctgggagtgcaaccggcccgcggcgcccggggggccgctcaagttctcggagaagttccagctcttcacgcccttctccctgggcttcgagttccggcccggccacgagtattactacatctctgccacgcctcccaatgctgtggaccggccctgcctgcgactgaaggtgtacgtgcggccgaccaacgagaccctgtacgaggctcctgagcccatcttcaccagcaataactcgtgtagcagcccgggcggctgccgcctcttcctcagcaccatccccgtgctctggaccctcctgggttcctag

SEQ ID NO: 367 - DNA, 5749 bp, Homo sapiens
cgcgggagccaacttcaggctgctcagaggaagcccgtgcagtcagtcacctgggtgcaagagcgttgctgcctcgggctctcccgctgcagggagagcggcactcgctggcctggatgtggttggatttaggggggctccgcagcaggggtttcgtggcggtggcaagcgctgcaacaggtagacggcgagagacggaccccggccgaggcagggatggagaccaaaggctaccacagtctccctgaaggtctagatatggaaagacggtggggtcaagtttctcaggctgtggagcgttcttccctgggacctacagagaggaccgatgagaataactacatggagattgtcaacgtaagctgtgtttccggtgctattccaaacaacagtactcaaggaagcagcaaagaaaaacaagaactactcccttgccttcagcaagacaataatcggcctgggattttaacatctgatattaaaactgagctggaatctaaggaactttcagcaactgtagctgagtccatgggtttatatatggattctgtaagagatgctgactattcctatgagcagcagaaccaacaaggaagcatgagtccagctaagatttatcagaatgttgaacagctggtgaaattttacaaaggaaatggccatcgtccttccactctaagttgtgtgaacacgcccttgagatcatttatgtctgactctgggagctccgtgaatggtggcgtcatgcgcgccattgttaaaagccctatcatgtgtcatgagaaaagcccgtctgtttgcagccctctgaacatgacatcttcggtttgcagccctgctggaatcaactctgtgtcctccaccacagccagctttggcagttttccagtgcacagcccaatcacccagggaactcctctgacatgctcccctaatgctgaaaatcgaggctccaggtcgcacagccctgcacatgctagcaatgtgggctctcctctctcaagtccgttaagtagcatgaaatcctcaatttccagccctccaagtcactgcagtgtaaaatctccagtctccagtcccaataatgtcactctgagatcctctgtgtctagccctgcaaatattaacaactcaaggtgctctgtttccagcccttcgaacactaataacagatccacgctttccagtccggcagccagtactgtgggatctatctgtagccctgtaaacaatgccttcagctacactgcttctggcacctctgctggatccagtacattgcgggatgtggttcccagtccagacacgcaggagaaaggtgctcaagaggtcccttttcctaagactgaggaagtagagagtgccatctcaaatggtgtgactggccagcttaatattgtccagtacataaaaccagaaccagatggagcttttagcagctcatgtctaggaggaaatagcaaaataaattcggattcttcattctcagtaccaataaagcaagaatcaaccaagcattcatgttcaggcacctcttttaaagggaatccaacagtaaacccgtttccatttatggatggctcgtatttttcctttatggatgataaagactattattccctatcaggaattttaggaccacctgtgcccggctttgatggtaactgtgaaggcagcggattcccagtgggtattaaacaagaaccagatgacgggagctattacccagaggccagcatcccttcctctgctattgttggggtgaattcaggtggacagtccttccactacaggattggtgctcaaggtacaatatctttatcacgatcggctagagaccaatctttccaacacctgagttcctttcctcctgtcaatactttagtggagtcatggaaatcacacggcgacctgtcgtctagaagaagtgatgggtatccggtcttagaatacattccagaaaatgtatcaagctctactttacgaagtgtttctactggatcttcaagaccttcaaaaatatgtttggtgtgtggggatgaggcttcaggatgccattatggggtagtcacctgtggcagctgcaaagttttcttcaaaagagcagtggaagggcaacacaactatttatgtgctggaagaaatgattgcatcattgataagattcgacgaaagaattgtcctgcttgcagacttcagaaatgtcttcaagctggaatgaatttaggagcacgaaagtcaaagaagttgggaaagttaaaagggattcacgaggagcagccacagcagcagcagcccccacccccacccccacccccgcaaagcccagaggaagggacaacgtacatcgctcctgcaaaagaaccctcggtcaacacagcactggttcctcagctctccacaatctcacgagcgctcacaccttcccccgttatggtccttgaaaacattgaacctgaaattgtatatgcaggctatgacagctcaaaaccagatacagccgaaaatctgctctccacgctcaaccgcttagcaggcaaacagatgatccaagtcgtgaagtgggcaaaggtacttccaggatttaaaaacttgcctcttgaggaccaaattaccctaatccagtattcttggatgtgtctatcatcatttgccttgagctggagatcgtacaaacatacgaacagccaatttctctattttgcaccagacctagtctttaatgaagagaagatgcatcagtctgccatgtatgaactatgccaggggatgcaccaaatcagccttcagttcgttcgactgcagctcacctttgaagaatacaccatcatgaaagttttgctgctactaagcacaattccaaaggatggcctcaaaagccaggctgcatttgaagaaatgaggacaaattacatcaaagaactgaggaagatggtaactaagtgtcccaacaattctgggcagagctggcagaggttctaccaactgaccaagctgctggactccatgcatgacctggtgagcgacctgctggaattctgcttctacaccttccgagagtcccatgcgctgaaggtagagttccccgcaatgctggtggagatcatcagcgaccagctgcccaaggtggagtcggggaacgccaagccgctctacttccaccggaagtgactgcccgctgcccagaagaactttgccttaagtttccctgtgttgttccacacccagaaggacccaagaaaacctgtttttaacatgtgatggttgattcacacttgttcaacagtttctcaagtttaaagtcatgtcagaggtttggagccgggaaagctgtttttccgtggatttggcgagaccagagcagtctgaaggattccccacctccaatcccccagcgcttagaaacatgttcctgttcctcgggatgaaaagccatatctagtcaataactctgattttgatattttcacagatggaagaagttttaactatgccgtgtagtttctggtatcgttcgcttgttttaaaagggttcaaggactaacgaacgttttaaagcttacccttggtttgcacataaaacgtatagtcaatatggggcattaatattcttttgttattaaaaaaacacaaaaaaataataaaaaaatatatacagattcctgttgtgtaataacagaactcgtggcgtggggcagcagctgcctctgagccctcgctcgtccacggtcttctgcatcactggtatacacactcgttagcgtccatttcttatttaattagaatggataagatgatgttaaatgccttggtttgatttctagtatctattgtgttggctttacaaataattttttgcagtcttttgctgtgctgtacattactgtatgtataaattatgaaggacctgaaataaggtataaggatcttttgtaaatgagacacatacaaaaaaaatctttaatggttaataggatgaatgggaaagtatttttgaaagaattctattttgctggagactatttaagtactatctttgtctaaacaaggtaatttttttttgtaaagtgcaatgtcctgcatgcataatgaaccgtttacagtgtatttaagaaagggaaagctgtgccttttttagcttcatatctaatttaccattattttacagtctctgttgtaaataaccacactgaaacctcttcggttgtcttgaaacctttctactttttctgtactttttgttttgttcttggtctcccgcttggggcatttgtgggactccagcacgttttctggcttctgcttcatcctgctccatcggggaatgacacactgcggtgtctgcagctcctggaaggtgtcatttgacaacacatgtgggagaggaggtccttggagtgctgcagctttgggaaagcctgcctcgtttcccttttcctctagaagcagaaccagctctacgagagtgagactgggaacttgatggctcagagagcatcttttcctcccattttagaaaatcagattttctcctgtgggaaaaaaaaattccatgcactctctctctgttaaagatcagctattcccttctgatcttggaaagaggttctgcactcctggaaccggtcacaggaacgcacagatcatggcaggatgcgctgggacggcccatcttggcaaggttcagtctgaatggcatggagaccgggagatagaggggttttagatttttaaaaggtaggttttaaaaataagttttatacataaacagttttggagaaaaattacagatcatataagcaagacagtggcactaaaatgtttaattcattaatctgtttgtttggcactgatgcaatgtatggcttttctcttgccccaaatcacaaacatatgtatctttggggaaactaacaatatgattgcactaaataaactactttgaatagaggccaaattaatcttttaaaaatgatgataatcatcaggtttactcagtgaaatcatattaattattttccaaaatctaaaagctgtagctggagaagcccatggccacgaggaagcagcaattaattagatcaacacttttctccagggttcaccatgcaggcaacattaccttgtctttcaaaagacacctgccttagtgcaaggggaaacctgtgaaagctgcactcagagggaggagtctttcttacataatttgcaatttcaggaatttaatttataggcagatctttaaatacagtcaacttacggtgcacagtaatatgaaagccacactttgaaggtaataaatacacagcatgcagactgggagttgctagcaaacaaatggcttacttacaaaagcagcttttagttcagacttagtttttataaaatgagaattctgacttacttaaccaggtttgggatggagatggtctgcatcagctttttgtattaacaaagttactggctctttgtgtgtctccaggtaactttgcttgattaaacagcaaagccatattctaaattcactgttgaatgcctgtcccagtccaaattgtctgtctgctcttatttttgtaccatattgctcttaaaaatcttggtttggtacagttcataattcaccaaaaagttcatataatttaaagaaacactaaattagtttaaaatgaagcaatttatatctttatgcaaaaacatatgtctgtctttgcaaaggactgtaagcagattacaataaatcctttacttt

SEQ ID NO: 368 - DNA, 3207 bp, Homo sapiens
aaatagggacctggccctgggccttgtgtagcgggagggggagctaggaagcagctgagggcagaatccaggagggcctggctgcgggggaatgaagcctccgccttcgcaggcaaaagcctttaaatacgggctcaggcccgggactcagagtgtaacgcgtggcagcctgagggaggggcgtgcgccgagagggagctcagatcgagcggggcgcgggtggagaagctgcggcggcgcggcccgtaggaaggtgctgtccgaacgatcgggataggagcggtccctgcgcttgctgctgggaagtggtacaatcatgtttgaaattaagaagatctgttgcatcggtgcaggctatgttggaggacccacatgtagtgtcattgctcatatgtgtcctgaaatcagggtaacggttgttgatgtcaatgaatcaagaatcaatgcgtggaattctcctacacttcctatttatgagccaggactaaaagaagtggtagaatcctgtcgaggaaaaaatctttttttttctaccaatattgatgatgccatcaaagaagctgatcttgtatttatttctgtgaatactccaacaaaaacctatggaatggggaaaggccgggcagcagatctgaagtatattgaagcttgtgctagacgcattgtgcaaaactcaaatgggtacaaaattgtgactgagaaaagcacagttccagtgcgggcagcagaaagtatccgtcgcatatttgatgcaaacacaaaacccaacttgaatttacaggtgctgtccaaccctgagtttctggcagagggaacagccatcaaggacctaaagaacccagacagagtactgattggaggggatgaaactccagagggccagagagctgtgcaggccctgtgtgctgtatatgagcactgggttcccagagaaaagatcctcaccactaatacttggtcttcagagctttccaaactggcagcaaatgcttttcttgcccagagaataagcagcattaactccataagtgctctgtgtgaagcaacaggagctgatgtagaagaggtagcaacagcgattggaatggaccagagaattggaaacaagtttctaaaagccagtgttgggtttggtgggagctgtttccaaaaggatgttctgaatttggtttatctctgtgaggctctgaatttgccagaagtagctcgttattggcagcaggtcatagacatgaatgactaccagaggaggaggtttgcttcccggatcatagatagtctgtttaatacagtaactgataagaagatagctattttgggatttgcattcaaaaaggacactggtgatacaagagaatcttctagtatatatattagcaaatatttgatggatgaaggtgcacatctacatatatatgatccaaaagtacctagggaacaaatagttgtggatctttctcatccaggtgtttcagaggatgaccaagtgtcccggctcgtgaccatttccaaggatccatatgaagcatgtgatggtgcccatgctgttgttatttgcactgagtgggacatgtttaaggaattggattatgaacgcattcataaaaaaatgctaaagccagcctttatcttcgatggacggcgtgtcctggatgggctccacaatgaactacaaaccattggcttccagattgaaacaattggcaaaaaggtgtcttcaaagagaattccatatgctccttctggtgaaattccgaagtttagtcttcaagatccacctaacaagaaacctaaagtgtagagattgccatttttatttgtgattttttttttttttttttggtacttcaggatagcaaatatctatctgctattaaatggtaaatgaaccaagtgtttttttttgttttttttttgagacagagtctcactgttgcccaggctggagtgcagtggtgcaatctcggctcactgcaagctctgcttcccaggttcacgccattctcctggctcagcctcccaagtagctgggactacaggcacccgccacagtgcctggctaattttttgtatttttagtagagacagggtttcaccatgtgagccaggatggtctcaatctcctgaccttgtgaaccacccgtctcggcctcccaaagtgctgggattacaggtgtgagccaccacgcctggcccatgaaccaagtgtttttaaggaaacaaaactatttttttaatcatcagatttatactagctatatggatattagcatatctggtaattatgaatctagaatttttttacatatttttataatactgttagctcagttattggatgagtgaaagataatcatgttggttttaatagtgtcaatttttgtaaaataaaaattaaacttcaaactctttactttataaattgtccataggccacactttaatatcacattataaagggaaggacagtcttcattcctcctggttattggtttgtttgtcattaaagatatattttgaatccatgaaattgctatgctaaacagcctttacatgtatggtctggttaaagttcctttgttccttttgttttaataaaatgtgtcactgattttttagctcaaaatcatcactgttaatttccagtcaccccaaatatggttaaaagattttttttttaatcatgaagagaaaattagtagcatttctttctctccccattatttattggttttcctcactaatctttttttttttagtccaaaagccaaaaatatttatcttggttttacattttaatttccattcttaattgtaatttttttctttaaataaggaaaccaatataatctcatgtataaaaacttaaatattttacaagttacatatagcatcattctaaaataagaattttttttgttttctgtctgcttttttcttatgtctcttgttgagttttatattttcagtggttatttttgcttgtgttagatcattattaaaatatatccaatgtccctttgatacttgtgctctgctgagaatgtacagtttgcattaaacatcccaggtctcatccttcaggaattttgcagttcaatgagaagagggagacaaatataaagatgaggacagaagcatctctacagatgaaaattacataaataaaacattctccatcaacaactaaaaaaaaaaaaaaaaaaa

SEQ ID NO: 369 - DNA, 2427 bp, Homo sapiens
aaaaagcagccaatgggagagccgaggcggggaggtgcggccaatggcgcgggcctgtttgattcaaaggttgcctataaagcgggactgcacgccggtttttgtccgagggctgtcgagtccgagcgccgccatggctctgctgtccgagggcctggacgaggtgcccgccgcctgcctgtcgccgtgcgggccgcccaacccgaccgagctgttcagcgagtcacggcgcctggctctggaggagctggtggcgggcggccccgaagccttcgcggccttcctgcgacgcgagcgcctggctcgtttcctgaaccccgatgaggtgcacgccattctgcgcgcggcggagaggccgggagaggagggcgcggcggcggcggcggcggccgaggactcgttcggctcctcgcacgactgctcttcgggcacctacttccccgagcagtcggacctggagccaccgctgttggagcttggctggcccgccttctaccagggcgcctaccgcggcgccacgcgtgtcgagacgcacttccagccccgcggcgctggcgaaggtggcccctacggctgcaaggacgctctgcgccagcagctccgctcggcgcgagaggtgattgcagtggtcatggacgtgttcacagacatcgacatcttcagagacctgcaagaaatatgcaggaaacagggagttgctgtgtatatccttctggaccaggctctcctctctcaatttctggatatgtgcatggatctgaaagttcatcctgaacaggaaaagttaatgacagttcggactatcacaggaaatatctactatgcaaggtcaggaactaagattattgggaaggttcacgaaaagttcacgttgattgatggcatccgcgtggcaacaggctcctacagttttacatagacggatggcaaattaaacagcagtaacttggtaattctgtctggccaagtggttgaacactttgatctggagttccgaatcctgtatgcccagtccaagcccatcagccccaaactcctgtctcacttccagagcagcaacaagtttgatcacctcaccaaccgaaaaccacagtccaaggagctcaccctgggcaacctgctgcggatgcggctggctaggctgtcaagtactcccaggaaggcggacctggacccagagatgcccgcagagggcaaggcagagcgcaagccccatgactgtgagtcctctactgttagtgaggaagactacttcagcagccacagggacgagctccagagcagaaaggccattgacgctgccactcaaacagagccaggagaggagatgccagggctgagtgtgagtgaggtgggaacacaaaccagcatcaccacagcatgtgctggtacccagactgcagtcatcaccaggatagcaagctctcaaaccacgatttggtccagatcgaccactactcagactgacatggatgagaacattctctttcctcgaggaactcaatctacagaagggtcaccagtctcaaaaatgtctgtatcgagatcttccagtttgaagtcttcctcctctgtgtcttcccaaggctctgtggcaagctccactggttctcccgcttccatcagaaccactgacttccacaatcctggctatcccaagtacctgggcaccccccacctggaactgtacttgagtgactcacttagaaacttgaacaaagagcggcaattccacttcgctggtatcaggtcccggctcaaccacatgctggctatgctgtcaaggagaacactctttactgaaaaccaccttggccttcattctggcaatttcagcagagttaatttgcttgctgttagagatgtagcactttatccttcctatcagtaactgctccgtgttcagactcctggtttcttccaggcttacagtggacatcatcagcttcctgctttaaaaaatatcttatgtccctaattgcctttcttttacctgactttgtcacctttgttgtctttgaattctttaggctgcatattattttacatgctttgttttgtcatgtatataccaggtattggttttatggtttaaacactatggatacaggggtttgttttgcacaattttaatagtcatgcactacataatgatgttttggtcaatgacagaccacgtatatgttggcagtctcataagattataatactgtatttttactataccttttctgtgtttagatacaaataccattatgttacagttgcctacagtattcagtgcagtaacatgatgtacaggtttgtagcctgttttgcatttttcttaggttgtatgctcttctgttttaaaggtttgaatcaccagcatttttgtgatcaaaatcctatttagaaaaaataaaactactttctgtttatctcttt

SEQ ID NO: 370 - DNA, 1614 bp, Homo sapiens
cctgccctggtgaaagggctcccgcaccgcccggtgctccccatctgcctggcgttgtgcgcagagctggaaagcatggctgttgtgcccagctaagacctgaatgccatcaccctccccagggctctgcagttttctcgtggtgaacccttgatggatttgttgttgcttgagaaatggcgatgatcgaattggggtttggaagacagaattttcatccattaaagaggaagagttcattgctgttgaaactcatagctgttgtctttgctgtgcttctattttgtgaatttttaatctattacttagcgatctttcagtgtaattggcctgaagtgaaaaccacagcctctgatggtgaacagaccacacgtgagcctgtgctcaaagccatgtttttggctgacacccatttgcttggggaattcctaggccactggctggacaaattacgaagggaatggcagatggagagagcgttccagacagctctgtggttgctgcagccggaagtcgtcttcatcctgggggatatctttgatgaagggaagtggagcacccctgaggcctgggcggatgatgtggagcggtttcagaaaatgttcagacacccaagtcatgtacagctgaaggtagttgctggaaaccatgacattggcttccattatgagatgaacacatacaaagtagaacgctttgagaaagtgttcagctctgaaagactgttttcttggaaaggcattaactttgtgatggtcaacagcgtggcgctgaacggggatggctgtggcatctgctctgaaacagaagcagagctcattgaagtttctcacagactgaactgctcccgagagctgctgtggtggctccagccgcgcctggttctcagtggccacacgcacagcgcctgcgaggtgcaccacgggggccgagtccccgagctcagcgtcccatctttcagttggaggaacagaaacaaccccagtttcatcatgggtagcatcacgcccacagactacaccctctccaagtgctacctcccacgtgaggatgtggttttgatcatctactgtggagtggtgggcttccttgtggtcctcacactcactcactttgggcttctagcctcaccttttctttctggtttgaacttgctcggaaagcgtaagacaagatgaagagcaggcgccattataaatatcaaagcccaagaaatggaactttgggcagagatcatgttagaatcaagtggatgatgagaccaattacaggccgtctctctgcacagcacagaaattctcaatcactgaaatgagtaactgcaaaataaatagttgattgtactgttctcatgctataaaagtggacaggtactctacaacaaatctgttttctcatttttatcaaatatatgtatcatcaaaggttgcatctgtacagtatgtaaatgctattaatgtcgtcactcacatgcacgacagtccttgttcccccaggaagggcctggtggccccagcacacacttgggattatgtgtatacataaataaatattgggctgtttccctcttaaaaaaaaaaaaaaaaaaaaaaaaaaaaaaaaaaaaaaaaaaaa

SEQ ID NO: 371 - DNA, 1340 bp, Homo sapiens
ggcacaagggggcgctttagggactggacttgcagtgtaaacagagacgctgcaaattgcttgtggacggtgtaggccgctgcaggccaccatgaaccggcttccggatgactacgacccctacgcggttgaagagcctagcgacgaggagccggctttgagcagctctgaggatgaagtggatgtgcttttacatggaactcctgaccaaaaacgaaaactcatcagagaatgtcttaccggagaaagtgaatcatctagtgaagatgaatttgaaaaggagatggaagctgaattaaattctaccatgaaaacaatggaggacaagttatcctctctgggaactggatcttcctcaggaaatggaaaagttgcaacagctccgacaaggtactacgatgatatatattttgattctgattccgaggatgaagacagagcagtacaggtgaccaagaaaaaaaagaagaaacaacacaagattccaacaaatgacgaattactgtatgatcctgaaaaagataacagagatcaggcctgggttgatgcacagagaaggggttaccatggtttgggaccacagagatcacgtcaacaacagcctgttccaaatagtgatgctggtcttgaattgtcctgcctgcatgaccacactcttgccttgattgccaaaggcatgaatcatacaaaaactcaatatagagcaatgtttgtaatgaattgttctattaacaaagaggaggttctaagatataaagcctcagagaacaaggaagaaaaggcgggtccataagaagatgaggtctaaccgggaagatgctgccgagaaggcagagacagatgtggaagaaatctatcacccagtcatgtgcactgaatgttccactgaagtggcagtctacgacaaggatgaagtctttcattttttcaatgttttagcaagccattcctaaacagcccaactggcatttaattacccaatactgtatataaggcaaatatggacagttactttcctcttgcctgttcatatccttcagtgacattgaggaagcagtgtttctctttttaaaggagaatagttgtcaaccttcattcatctcttacatctctcaccctctccttttttttttctttgattttcccccttattgatgggactgatattcattctgtttttgatgaacatttggaaactgtcgggctttttattaaagctctgtagaattaaaatgttctggaattataagcaatctttgtttctgagtgttatttttattttggatatagctttgatgtaattaaactggaaactctttcctgaattgtctgtaaaaaaa

SEQ ID NO: 372 - DNA, 7817 bp, Homo sapiens
gaaagtgaccggaagtaaccgccgggccaagatggctgcagaggaaggggtcgcgagtgctgcttccgccggcggtagctggggcaccgcggccatggggcgggttctaccgatgctgttggtgccagtccccgccgaggcgatggggcagctcggctcccgggcgcagctgcgcacacagccggaggctctggggagcctgacggctgcgggcagcctccaagtgctttctttgacgcctggcagccggggcgggggtcgctgctgcctggagggccccttctggcactttctatgggaggattctcgtaacagcagcacaccaactgaaaagcccaaactgctcgctcttggtgaaaattatgaactgcttatctatgaatttaatttgaaagatggaagatgtgatgcaaccattttgtatagctgtagtagggaggcattgcaaaagctcattgacgatcaagatatcagtatttccttattgtctttgagaatcctgtcatttcacaataacacatcattactgttcatcaacaaatgtgtcatcctacatattatatttcctgaaagagatgctgcaattagagtactcaactgtttcacacttcccttgcctgcacaggcagtggacatgattattgacacgcagctctgcagaggaattctttttgttttgagtagtttaggctggatctacatttttgatgttgtggatggtacatatgtagctcatgtggatttagcacttcacaaagaagacatgtgtaatgagcagcaacaggagccagccaagatttcttcatttacttcactgaaagtttctcaagacctcgatgttgcagtgattgtcagctcctccaactccgcagttgctcttaacttaaatttgtatttcaggcaacacccaggacacctactgtgtgaaagaatactagaagatcttcctattcaaggacctaagggcgtagatgaagatgatcctgttaactctgcctacaacatgaaactggccaagttttccttccaaattgataggtcttggaaagcccagctatcatcattgaatgaaacaataaagaactccaaactggaggtttcctgttgtgctccatggttccaggatattttgcatttggagtcacctgaatctggtaaccacagtacaagtgtgcagagctgggccttcattccacaggacataatgcatgggcaatataatgttctacagaaagatcatgccaagaccagtgatccaggaagatcatggaaaataatgcacatcagtgaacaagaggaacccatagagcttaaatgtgtgtctgtgacaggattcactgcactgtttacttgggaagtggaaaggatgggctataccattaccctctgggatttggagacccagggcatgcagtgtttttcccttggcacaaagtgtattcctgtagacagtagtggagaccagcagctgtgctttgttttgacagagaatggactctctctgattttgtttggtttgactcaagaagagtttttaaacagactcatgatccatggaagtgccagcactgtggacactctttgtcatctcaatggctggggaaggtgctcaattcccatacatgcactagaggccgggatagaaaatcgtcagctggacacagtaaatttctttttgaagagcaaggaaaatctttttaatccatcctcaaaatcttctgtatctgatcagtttgatcacttgtcatcccatttatatttaagaaatgtggaagagctgataccagcattggatttactttgctcggcaattagagaaagttattctgaaccccaaagcaaacacttttcagaacaattgcttaatcttacactgtctttccttaacaaccaaataaaggagcttttcattcacactgaagaactagatgaacatctgcaaaaaggagtgaacattttgactagctacattaatgaacttcgaaccttcatgataaagtttccttggaagctaacagatgctatagatgaatatgatgtacatgaaaatgtccccaaagtaaaggagagcaatatatggaagaaactcagctttgaggaagttattgccagcgccattttaaacaacaaaataccagaggcacagactttcttcaggattgatagtcattctgctcaaaaacttgaggagcttattggcataggcctaaatttggtctttgacaatttaaaaaagaacaatataaaggaagcctctgaacttttgaagaatatggggtttgatgtaaaaggccaattgctcaagatctgcttctatacaactaataaaaatatacgtgactttttggttgaaattttaaaagaaaaaaattatttttctgaaaaagagaaaagaactatagacttcgtgcatcaagttgagaagctttatttgggacatttccaagaaaatatgcaaatccagtcatttcccaggtactggataaaggaacaagattttttcaagcacaagtctgttttggactcattcctgaaatatgattgtaaagatgaatttaacaaacaggaccatagaattgtgttaaattgggctctgtggtgggatcaactaacacaagaatccatccttctccccaggataagtccagaagaatacaaatcatattcccctgaagccctctggagatacctcacagctcgccatgattggttaaacattatcttatggattggagaatttcaaacccagcatagttatgcttcacttcagcagaacaaatggccccttctgactgttgatgttattaaccagaatacttcctgtaacaactacatgaggaatgaaattttagataagctggccaggaatggggtttttttggcatctgaactggaagactttgaatgcttcctcctaagactgagccgtattggaggtgtaatacaggataccctccctgttcaaaactacaagaccaaagaaggttgggatttccattctcaattcattctctattgtttggagcacagtctgcagcatcttctttatgtctaccttgactgttacaaacttagtcctgaaaattgtccctttttggaaaaaaaagagttacatgaagcacacccttggtttgaatttttagttcagtgtcgacaagttgccagtaacttaacagatcccaaactgatcttccaggctagccttgcaaatgctcagattttgattcccaccaatcaggccagtgtaagcagtatgctattggaaggacataccctcctggcccttgctactacaatgtattctcctgggggtgtcagtcaggttgttcagaatgaagaaaatgaaaactgtttgaagaaagtggatccccagctattgaagatggcattaactccttaccccaagctaaaaactgctctcttcccacagtgcactcctcctagtgtcctgccatctgatattacaatctaccaccttattcagtcattatcaccctttgatcctagcagattgtttggctggcagtctgctaacacactagctataggagatgcatggagtcatctcccacatttctctagccctgacctggttaataaatatgctatagtggaacgtctgaattttgcttattatttacataatgggcggccatcatttgcatttggtacttttctggtccaggaattaatcaagagcaagactcccaagcagctgatccagcaagtaggcaatgaagcctatgttatagggctctcctccttccacataccttcaataggagctgcatgtgtttgtttcttagaattgcttggccttgacagcctcaagctcagagttgatatgaaagtggccaatataattttgagctacaagtgcagaaatgaagatgctcagtacagctttatcagagagtctgtagccgaaaaactatctaaactagctgatggtgaaaagacaaccacagaagaattgcttgttctcttagaagaaggtacatggaacagcattcagcaacaggaaataaagaggttatccagtgaatctagcagccaatgggcattagtggtgcagttctgcaggctacacaatatgaaactaagcatatcttaccttagagaatgtgccaaagcaaatgattggctgcagttcattattcacagccaactccacaactaccacccagcagaggtgaaatcccttatccagtacttcagcccagtcattcaagaccacttaaggctggcttttgagaacttgccctcagtgcccacctccaaaatggacagcgatcaagtctgcaataagtgcccccaggaacttcaaggaagcaaacaagagatgaccgatttatttgaaattctgctccaatgctcagaggagccagactcctggcactggcttctggttgaagcagtgaaacaacaggcccctatcctcagtgttctggcctcatgtctccagggtgccagtgccatttcttgtctctgtgtttggatcatcacttctgtggaggacaatgttgcaactgaagcaatgggacacattcaggactcaacagaggaccatacctggaaccttgaggatctttcagtcatctggagaacattattaacaagacaaaagagcaaaactctcatcagaggtttccagcttttctttaaggattccccgttactactggtgatggagatgtatgaactgtgtatgttcttcaggaattataaagaagctgaagctaaacttctggagtttcagaagagccttgaaacgcttaacacagcagccacaaaggtccaccctgtcatccctgccatgtggctggaggatcaggtgtgtttccttttgaagcttatgctacagcagtgtaagacccagtatgagctggggaagcttttacagctctttgttgaaagagagcatctcttctctgatggtccagatgtgaaaaagctttgcatcctttgccagattttgaaggatacatccatagccattaatcatacaattattaccagctacagcattgagaatcttcagcatgaatgtagatctattttggaaagactgcagacagatggacaattcgctttggccaggagggtagcagaattagctgagttacctgtggacaacttggttattaaagagataacacaggaaatgcagaccctaaaacacattgaacagtggtcactaaaacaagcaagaattgacttctggaaaaaatgccatgagaattttaagaaaaattcaatttcaagcaaagcagcttcttcctttttctcaacccaggcccatgtggcatgtgagcacccaactggatggagcagcatggaggagcgccatctgctgctcaccttggcagggcactggcttgcccaggaggacgtggtgcccttggataagctggaggagctggagaagcagatctggctgtgccgcatcacccagcacactcttggaagaaatcaggaggaaacagagcccagattttctcgacagatctcaactagtggtgaactttcctttgatagtttagccagtgagttttccttctccaagttggctgctctgaacacatcaaaatacttagaacttaacagccttccatccaaagagacatgcgagaatagattggattggaaagagcaggagtcactaaactttttgattgggcgcctactggatgatggctgtgtgcatgaagcaagtagagtatgccggtattttcatttttataatccagatgtcgccttggtattgcactgcagagcactggcctcaggggaagctagtatggaggatctgcacccagagatccatgctctcctacaaagtgctgagctgcttgaggaagaagcacccgacattcccctaaggagagtccacagcacttcaagtctggatagtcagaagtttgtgacagtgccctccagtaatgaagtggtaactaacctggaagtgctgacaagcaaatgcctccatgggaagaactactgtcgacaggtcctctgtctgtatgatcttgccaaggagttgggctgttcctacacagatgttgctgctcaggatggtgaagccatgctccggaaaatcttggcctctcagcagcctgaccgatgcaaacgagcccaggccttcatcagcacacagggccttaagccagatactgtggctgaactcgtggcagaagaggtgacacgggagctgcttacttcatcacagggaacaggacataagcagatgttcaacccaacagaggaaagccagacatttcttcagctgaccactctgtgtcaagaccgcacattggtaggcatgaagttgttggataagatttcctccgttccccatggggaactgtcttgcaccacagagctcctgatcctggcccatcattgcttcaccctgacgtgccacatggagggcatcatccgagtcctacaggccgcccacatgctcacagataaccacctggcccccagtgaggagtatgggctggtggtacggctcctcactggcattggaaggtacaacgagatgacatacatatttgatttgctgcataaaaagcactactttgaagtgctaatgaggaagaagttggatccgagtggtaccctgaaaacagccctgctggactacatcaaacgctgccgtcctggagacagtgaaaagcacaatatgattgccctgtgcttcagcatgtgccgggagattggcgagaaccacgaggcagctgcccgcatccaactgaaattgattgagtctcagccctgggaggacagcctcaaggatgggcaccagctgaaacaactgctgctgaaggccctgactctgatgttggatgcagcagagagttatgccaaggactcctgtgtgcgacaggcccagcactgtcagcggctcaccaagttgataactctgcagattcactttctgaacactggccagaacacaatgctcatcaacttgggccgccacaagctgatggactgtattctggccctacctcggttctaccaggcttctattgtggctgaggcctacgattttgttccagattgggctgaaattttataccagcaagtgattcttaaaggagactttaattacttggaagaatttaagcagcaaaggttattaaagtccagtatatttgaagagatttccaaaaaatataaacaacatcagcctactgacatggtcatggaaaacctgaagaaattactcacatattgtgaagatgtttacctgtattacaagttggcatacgaacacaagttttatgaaattgtaaatgtgcttctgaaggaccctcagacaggttgctgtctaaaggacatgctagcaggttagatgatttcataggtgtctgttttcttgtactgttagcagattctgacagatgtgatgagaagaagaatgcattggagatctttgctaaagttgaacaatcccggtactgtaccatatcagtcctttgtgggtagtaggtagcaagtaagaaacttttcaggaggaaattcctatttaaaatagattgattttagatgattgttcatccacaccattttatatagatactagtattaagatcaaaagcttcctcttcctcaggacagcttctactttagatgatccaataatgattaaagaatacctgtacctgcagattccagtttcaaagaaatttaattattatttacacagttaaggaacaggtgatacattttcatttgttagaaactgatctttctgtaataaaatagattttcaattcaaaaaaaaaaaaaaaaaaaaaaaaaaaaaa

SEQ ID NO: 373 - DNA, 2503 bp, Homo sapiens
ggactttgaaatccaacccggtcacctacccgcgcgactgtgtccacggatggcacgaaagccaagcgagtccccctgccgagctactcgcgtccgcctcctcccaagctgagctctgctccgcccacctgagtccttcgccagttaggaggaaacacagccgcttaatgaactgctgcatcgggctgggagagaaagctcgcgggtcccaccgggcctcctacccaagtctcagcgcgcttttcaccgaggcctcaattctgggatttggcagctttgctgtgaaagcccaatggacagaggactgcagaaaatcaacctatcctccttcaggaccaacgtacagaggtgcagttccatggtacaccataaatcttgacttaccaccctacaaaagatggcatgaattgatgcttgacaaggcaccaatgctaaaggttatagtgaattctctgaagaatatgataaatacattcgtgccaagtggaaaagttatgcaggtggtggatgaaaaattgcctggcctacttggcaactttcctggcccttttgaagaggaaatgaagggtattgccgctgttactgatatacctttaggagagattatttcattcaatattttttatgaattatttaccatttgtacttcaatagtagcagaagacaaaaaaggtcatctaatacatgggagaaacatggattttggagtatttcttgggtggaacataaataatgatacctgggtcataactgagcaactaaaacctttaacagtgaatttggatttccaaagaaacaacaaaactgtcttcaaggcttcaagctttgctggctatgtgggcatgttaacaggattcaaaccaggactgttcagtcttacactgaatgaacgtttcagtataaatggtggttatctgggtattctagaatggattctgggaaagaaagatgccatgtggatagggttcctcactagaacagttctggaaaatagcacaagttatgaagaagccaagaatttattgaccaagaccaagatattggccccagcctactttatcctgggaggcaaccagtctggggaaggttgtgtgattacacgagacagaaaggaatcattggatgtatatgaactcgatgctaagcagggtagatggtatgtggtacaaacaaattatgaccgttggaaacatcccttcttccttgatgatcgcagaacgcctgcaaagatgtgtctgaaccgcaccagccaagagaatatctcatttgaaaccatgtatgatgtcctgtcaacaaaacctgtcctcaacaagctgaccgtatacacaaccttgatagatgttaccaaaggtcaattcgaaacttacctgcgggactgccctgacccttgtataggttggtgagcacacgtctggcctacagaatgcggcctctgagacatgaagacaccatctccatgtgaccgaacactgcagctgtctgaccttccaaagactaagactcgcggcaggttctctttgagtcaaaagcttgtcttcgtccatctgttgacaaatgacagacctttttttttcccccatcagttgatttttcttatttacagataacttctttaggggaagtaaaacagtcatctagaattcactgagttttgtttcactttgacatttggggatctggtgggcagtcgaaccatggtgaactccacctccgtggaataaatggagattcagcgtgggtgttgaatccagcacgtctgtgtgagtaacgggacagtaaacactccacattcttcagtttttcacttctacctacatatttgtatgtttttctgtataacagccttttccttctggttctaactgctgttaaaattaatatatcattatctttgctgttattgacagcgatataattttattacatatgattagagggatgagacagacattcacctgtatatttcttttaatgggcacaaaatgggcccttgcctctaaatagcactttttggggttcaagaagtaatcagtatgcaaagcaatcttttatacaataattgaagtgttccctttttcataattactgtacttcccagtaaccctaaggaagttgctaacttaaaaaactgcatcccacgttctgttaatttagtaaataaacaagtcaaagacttgtggaaaataggaagtgaacccatattttaaattctcataagtagcattcatgtaataaacaggtttttagtttgttcttcagattgatagggagttttaaagaaattttagtagttactaaaattatgttactgtatttttcagaaatcaaactgcttatgaaaagtactaatagaacttgttaacctttctaaccttcacgattaactgtgaaatgtacgtcatttgtgcaagaccgtttgtccacttcattttgtataatcacagttgtgttcctgacactcaataaacagtcattggaaagagtgccagtcagcagtcatgca

SEQ ID NO: 374 - DNA, 7609 bp, Homo sapiens
atctaccaccttaaaaccctgatctagaaaaaatatatattcatgataggaagttataactaagaaaatttatttgcctcttaatgctcctgaatgaaagaaattatccctttgttctttgggaggacttgtgtatctgagattgttgtaataatcagtcattttattaaaaccttgacatgatcaccagggaggaaaaatagagcaatagtcaaaacctgtgtgttagtccaagatgacttctgaagaaatgacagcttctgttctcatacctgtgactcagagaaaagtggtttctgcccagtcggctgcagatgaaagtagtgaaaaggtctcagacatcaatatttcaaaagcacatactgtcagacgaagtggggagacttctcataccatctcacaactgaacaaacttaaagaagaaccttctggaagcaacttgccaaagattctctcaatagcgagggagaaaatagtgagtgatgagaacagtaatgaaaaatgttgggagaaaatcatgccagattctgcgaaaaaccttaacattaactgcaacaacatattgagaaaccatcagcatggccttcctcagagacaattttatgaaatgtacaactctgttgctgaggaagacttgtgtttagaaactggaattccttctccactggaaagaaaggtgttccctggaattcaactggaactagacagaccttccatgggcattagtcctttaggaaatcagtcagtgatcatagagacaggcagagcacaccctgacagcagaagggcagtatttcattttcattatgaagttgacagaagaatgtcagacactttctgtaccctatcagaaaacttaattttagacgattgtggaaattgtgtaccactacctgggggtgaggagaagcaaaagaaaaactatgtggcatatacctgtaaactgatggaattggccaaaaattgtgataataagaatgagcagctgcagtgtgatcattgtgacaccttgaatgataaatacttttgctttgaaggctcttgtgagaaggttgacatggtatattcaggtgatagcttttgtaggaaagactttactgacagtcaagctgccaagacctttttgagccattttgaggacttccctgataattgtgatgatgtagaagaagacgcttttaaaagcaaaaaggagcgatccactttgttagtcaggagattctgtaaaaatgacagagaagttaagaaatctgtgtatactggaacaagagcaattgtgagaactctgccttctggccacattgggctgactgcatggagttacatagatcagaagagaaatggtcccttactgccttgtgggagagtaatggaacccccgtcaacagtggagataaggcaagatgggagccaacgtctgtcagaagcccagtggtatcctatctacaatgcagtgagaagagaagaaacagaaaatacagttggatctctactccatttcctcaccaagctcccagcctccgagacagcccatggaaggataagcgttggtccatgcttaaagcaatgtgtccgagacactgtatgtgagtatcgcgccaccctccaaaggacttcaatatcgcagtacatcaccggttctctcctagaagcaaccacgtctttgggagcaagaagtggccttctcagtacttttggaggatccactggacgaatgatgctgaaagaacgccagccaggcccctctgtggccaattccaatgccctcccttcaagttcagctgggatcagcaaggagctgatcgatctgcagcctctcatccagttcccagaggaagtcgccagcatcctgatggagcaagagcagactatttaccgcagggtcttgccagtcgactacctttgcttcttaacacgggacttgggcactcctgaatgccagagctccttgccctgcctcaaagcatccatctcagcgtcgattcttaccactcagaatggagagcacaatgcccttgaagatctggtgatgaggtttaatgaggtgagctcctgggtgacatggctgatcctcacggcaggctccatggaggagaagcgagaagtcttttcatatttggtgcatgtggccaaatgctgctggaacatgggcaactacaacgctgtcatggagttcttggctggcctcaggtcaagaaaagttttaaaaatgtggcagttcatggaccagtctgatattgagaccatgaggagcctgaaggatgctatggcccagcatgagtcctcttgtgagtacagaaaggtggtgacacgtgccctgcacatccctggctgtaaggtggttccattctgtggggtgtttctgaaggagctctgtgaagtgcttgacggcgcctccggtctcatgaagctttgcccgcggtacaattcccaagaagaaactttagagtttgtagcagattacagtggacaagataatttcttacaacgagtgggacaaaatggcttaaagaattcggagaaggagtccactgtcaacagcatctttcaggtcatccggagctgcaatcgaagtctggagacagacgaggaggacagccccagtgaagggaacagctccaggaaaagctccttgaaggataaaagccgatggcagtttataattggagatttgttggattcagacaatgacatctttgagcaatccaaagaatacgactctcatggttcagaggactcacagaaggccttcgaccatgggacggagctcatcccttggtacgtgctgtccatccaagccgatgtgcaccagttcctgctgcagggggccacggtcatccactacgaccaggacacacacctctctgcccgctgcttcctccagcttcagcccgacaatagcaccttgacctgggtaaagcccacaactgcctccccagccagcagtaaagcaaaacttggtgtacttaataacacagctgagcctggaaaattcccactactgggtaatgctggattaagtagcctgacggaaggggtcttggatctttttgcagtgaaggctgtatacatgggccaccctggcattgatatacacactgtgtgtgttcagaacaaactgggtagcatgttcctgtcagagactggtgtgacattgctctatgggcttcagaccacagacaacagattattgcacttcgtggcaccaaagcacacagctaaaatgctcttcagcggattattggaactcactagagctgtgagaaagatgaggaaattccctgaccaaagacagcagtggctgcggaaacagtacgtcagcctttatcaggaggatggacggtatgaaggcccaactttggctcacgctgtggagttgtttggtggcagacggtggagtgctcgaaaccccagccccggaacatcagcaaagaatgctgagaagcccaatatgcagagaaacaataccctgggcataagcactaccaagaaaaagaagaaaatcctcatgaggggtgagagtggagaggtaactgacgatgagatggcaacccgaaaggccaagatgcacaaagagtgtcgaagccggagtggttctgatcctcaagacattaatgaacaagaagaatcagaggtgaatgccatcgctaaccctccaaaccccctcccttccagaagagcccactctttgaccacagctgggtcccccaacttggctgccgggacgtcatctcccatcaggccagtgtcctcccctgtgctgtcttcttcaaacaagagcccatccagtgcttggagcagtagtagctggcacgggcggatcaaaggcggcatgaagggatttcagagcttcatggtttcagatagcaacatgagttttgttgaatttgttgagctgttcaaatcattcagtgtcaggagccgcaaggacctgaaggatctgtttgatgtctatgcagtgccctgcaaccgatctggctccgagtcagccccactctacaccaacctgacaattgatgaaaacaccagcgatcttcagcctgacctagatctgttgaccagaaatgtctcggatttggggttgttcattaagagtaaacagcagctatcggacaaccagaggcagatatctgatgccattgctgctgcaagcattgtgacaaatggcactgggattgagagcacatctctgggcatttttggggtgggcatacttcagctcaacgatttcctcgtgaattgccaaggagaacactgcacttatgatgaaatcctcagcatcatccagaagttcgagcctagcatcagtatgtgtcatcagggactaatgtcatttgaagggtttgccaggtttctgatggataaagaaaattttgcctcaaaaaatgatgagtcacaggagaacattaaagaactgcagctacccctctcatactattacatcgaatcttcgcacaatacctacctcacgggccatcagctcaaaggagaatcctcggtagaactctacagccaggtccttttgcaaggctgtcgaagtgtagaattggactgctgggacggagacgatgggatgcccatcatttatcatggacatacgccgacaaccaagatccccttcaaggaagtggttgaagccattgatcgcagtgccttcatcaactctgacctgccaatcatcatatcgattgagaaccactgttcattgcctcagcaacgaaaaatggcagaaattttcaagactgtgtttggagaaaagctggtgactaaattcttatttgagactgatttctcagatgatccaatgcttccttcacctgaccaactcagaaagaaagttcttcttaaaaacaagaagctaaaagcccatcagacgccagtggatatcttaaagcaaaaggctcatcagttagcatctatgcaagtgcaggcttataatggtgggaatgccaacccccgacctgccaataatgaggaagaggaagatgaggaggacgaatatgattatgactatgaatccctttctgatgacaacattctggaagacagacctgaaaataaatcatgtaatgacaagcttcagtttgaatataatgaagaaatcccaaagaggataaagaaagcagataactctgcttgcaacaaaggaaaggtttatgatatggaactgggagaagaattttatcttgatcagaataaaaaggaaagcagacagattgcaccagagctttctgaccttgtaatctatcgtcaagcagtaaaatttccaggactgtcaactctaaatgcatctggctctagcagaggaaaagaaaggaaaagcaggaagtccatttttggcaacaatccgggcagaatgagcccaggggagacagcatcatttaacaaaacatctggaaaaagttcctgtgaaggcattcgacagacctgggaggaatcttcttcccccctcaacccaaccacgtccctcagtgctatcattagaactcccaaatgttatcatatctcgtcgctgaatgaaaatgccgccaaacgtctgtgtcgcaggtattctcagaaactgatccagcacaccgcctgtcagctgctgagaacttaccctgctgccacccgcatcgactcttccaacccgaaccccctcatgttctggctccatgggatacagcttgtggcactcaactaccagactgatgatctccctttacatttaaatgctgcaatgtttgaggcaaatggtggttgtggttatgtattgaaacctccagttctgtgggacaagaactgccccatgtatcagaagttttctccactagaaagagatctggacagcatggatcctgcagtctattctttaactattgtctctggtcagaatgtgtgccccagtaatagcatgggaagcccgtgcattgaagtcgacgtcctgggcatgcctctggacagctgccatttccgcacaaagcccatccatcgaaacaccctgaaccccatgtggaacgagcagtttctgttccgcgttcacttcgaagatcttgtatttcttcgttttgcagttgtggaaaacaatagttcagcggtaactgctcagagaatcattccactgaaagctttaaaacgaggatatcgacatcttcagctgcgaaaccttcacaatgaagtcttggagatttctagtttattcattaacagcagaaggatggaagaaaattcctctggcaataccatgtcagcctcttcgatgtttaatacagaagaaagaaaatgtttgcagactcacagagtcacggtgcatggggtcccagggccagagccctttaccgttttcactattaatggaggcaccaaggcaaagcagcttctgcagcaaattctgacaaatgaacaagacatcaaacctgttaccacagactattttttgatggaagaaaaatattttatatctaaagaaaagaatgaatgtaggaaacaaccattccagagagccattggtccagaagaggagatcatgcaaattttaagcagctggtttccagaagagggatacatgggcaggattgtcttaaaaacccagcaggaaaacctagaagagaaaaacattgttcaagatgacaaagaggtgatcttgagctcagaggaggagagtttctttgtccaagtgcatgatgtttctccagagcaacctcgaacagtcatcaaagcaccccgcgtcagcactgcacaggatgtcattcagcagaccttatgcaaagccaaatattcctacagcatcctgagcaaccccaatccaagcgactatgtgcttttggaagaggtggtgaaagacactaccaacaagaagactaccacaccaaagtcctctcagcgggtccttctggatcaggagtgtgtgtttcaagcccaaagcaagtggaaaggtgcaggaaaattcatccttaagctaaaggagcaggtgcaggcatctcgagaagataaaaagaaaggcatttctttcgcaagtgaactcaagaagctcaccaagtcaactaaacagccccgaggacttacatcaccttctcagctcttgacctcagaaagtatccaaaccaaggaggagaaacctgtgggtggcttgtctccagtgacacaatggattaccgacagtgactaagggcagcatgtttaacccaggtggagatctttaagcaagaagttaaagagtgaacatggtggaaaaaatataattattttcatcagacttaaactggaaattgatgatttctgaactgaagccttcacacatgtgagatccatgctgaggagaagcaaaatggcacagggctagttgccaccaaccaatttactgatgaatgaagcccaggggactgccattttataaatgtcagcagttggaaaaatcgtcacgaattgacttagagcaagggtcagcaagcttgtctgtaaagggccaaacagtaaatattttagggctgggggccataaaatatgttgcaaccacccaattctgccattgtagtgcaaaagcagccatagacaacacatacatgaacgaacgtggctgtattccaataaaactttatttatggacactgaaaaaaaaaaaaaaaaaaaa

SEQ ID NO: 375 - DNA, 3524 bp, Homo sapiens
gggatgccgggggggcaagatggcggcggcagtaggggttcgtggccggtacgagctgccgccttgctccggcccaggctggctcctcagcctttccgccttgctgagtgtggcggcacgaggggccttcgccaccacgcactgggtcgtcacggaggacgggaaaatccagcagcaggtggattcaccaatgaacttgaagcatcctcatgacctagtcatattaatgagacaagaagcaacagttaactacctcaaagaattagagaaacaattagttgctcaaaaaattcacatagaagagaatgaggacagagacacaggactggaacagagacataataaagaagacccagactgcatcaaagccaaggtgcccttaggggacctggatctatatgatggcacatacataactttggagagcaaagacatcagtcctgaagattatatagacacagaatctcctgtccctccagacccagagcaacctgattgtactaaaattctagaacttccatatagtatacatgcttttcagcacttgagaggtgtacaggagagagttaatctttctgcacctctgctacctaaagaagacccaatcttcacatatttatctaaacggttaggaaggagtatagatgacataggtcacctcattcatgaaggcctacagaagaacacttcctcgtgggtactgtataacatggcttcattttactggagaattaagaatgagccatatcaggtagtagaatgtgccatgcgagcacttcacttctcttccaggcacaataaagacattgccctggtcaacctggcaaacgttctacacagagcacacttctctgctgatgctgctgtcgtggtccatgcagctctggatgacagtgacttcttcaccagctattacactttggggaatatatatgcaatgcttggggaatataaccactcagtgctctgttatgaccacgctttgcaggccagacctgggtttgagcaagctataaagaggaagcatgctgtcctatgtcagcaaaaactggagcagaaattggaggctcagcatagatctctccagcgaacactgaatgagttaaaagagtatcaaaagcagcatgaccactacctgagacagcaggaaatcctagaaaaacataaactgattcaggaggagcaaatcttaagaaatatcattcatgagactcagatggcaaaagaggcacaattaggaaatcatcagatatgccgactggtcaaccagcagcatagtttacattgccagtgggaccagcctgtacgctatcatcgtggagatatctttgaaaatgtggactatgttcagtttggtgaggattcatcaacctccagtatgatgtctgtgaactttgatgttcaatcaaatcagagtgatatcaatgattcggtcaagtcttctcccgtagcccattctattctctggatttggggcagggactctgatgcatatagggacaaacagcatattctatggcctaaaagagcagattgtacagaaagctaccctagagtccctgttggtggggaattgccaacgtattttctgcctccggaaaacaaaggactcaggatccacgaactcagcagtgatgattattctacagaagaagaggcccaaacccctgactgttccataactgacttcagaaaaagccacactctgtcctacttagtcaaagaattagaggttcgcatggatctgaaagccaaaatgccagatgaccatgcacgaaaaattttgctttcccgtattaataactatactatcccagaagaagaaattgggtctttcttatttcatgctattaataagccaaatgctcctatctggctcatactcaatgaagctggactatactggagagcagtaggaaatagcacttttgctattgcctgtcttcagagggctttgaatttagctccacttcaataccaagatgttcctcttgtcaacttggccaaccttttgattcattacggccttcatcttgatgccactaagctgctacttcaagctttggccatcaatagctctgagcctctgacctttttgagcctgggaaatgcttaccttgctctgaagaatatcagtggggcacttgaggcctttagacaggccttgaaattaaccaccaaatgtccagagtgtgaaaacagcctgaagttgatccgctgtatgcagttttatccttttctgtacaacatcacttcttctgtttgcagtggtacggtggttgaggagagcaatggttctgatgagatggagaattcagatgaaaccaaaatgtcagaagaaatactggctttggtggatgaatttcaacaggcatggcctttggaaggctttgggggtgcactagagatgaaagggcggcgtctagacttacaaggaatacgggtgctgaagaaaggtccccaggatggagtggccagaagctcttgctatggagactgcagaagtgaagatgatgaagcaacagaatggattacattccaggtcaaacgtgtaaagaaacccaaaggagatcataagaaaactcctgggaaaaaagtagaaacaggtcagatagaaaatggacatcgttaccaagcaaacctagagatcactggccccaaggtggcatctcctgggccacaaggaaaaaaacgtgactaccagcgtctgggatggcccagcccggacgaatgcctcaaactccgctgggtagagctgactgccatcgtgagtacctggcttgcagtttcttcaaaaaacattgacatcacagaacacatagattttgccacccctatacagcagccagcaatggagcctctttgcaatggcaatctccccacgagtatgcataccctggaccacttgcatggggtttccaaccgagccagcctgcactacacaggggagagtcagttaacagaggtattacaaaatctcggcaaagaccaatatccacaacagtcgcttgaacagattggcacccgaattgccaaagttttggaaaagaaccagacgtcctgggtcctctccagcatggcagccctctactggagggtgaaaggccaaggaaagaaggcaatcgactgcctccgccaggctctgcactatgcgccacaccagatgaaggatgtgcccctgattagcctggccaacatcttgcacaatgccaagctctggaatgacgccgtcatagtagccaccatggcagtagagatcgcaccacactttgctgtgaaccacttcactctgggcaatgtctacgtggcaatggaagaatttgaaaaagcactggtgtggtatgaatccacattgaagcttcagcccgagtttgtcccagccaagaaccgaatccagaccatccagtgtcacttaatgctgaagaagggacggcgctctccttagtgcacttcttccttctctctttctctttactcatgctctaaaaaaaaaaaaaaaaaaaaaaaaaaaaaaaaaaaaaaaa

SEQ ID NO: 376 - DNA, 2719 bp, Homo sapiens
acttaaggtcggcgacccgaggccgcggctgccgactgggtcccctgccgctgtcgccaccatggctccgcaccgccccgcgcccgcgctgctttgcgcgctgtccctggcgctgtgcgcgctgtcgctgcccgtccgcgcggccactgcgtcgcggggggcgtcccaggcgggggcgccccaggggcgggtgcccgaggcgcggcccaacagcatggtggtggaacaccccgagttcctcaaggcagggaaggagcctggcctgcagatctggcgtgtggagaagttcgatctggtgcccgtgcccaccaacctttatggagacttcttcacgggcgacgcctacgtcatcctgaagacagtgcagctgaggaacggaaatctgcagtatgacctccactactggctgggcaatgagtgcagccaggatgagagcggggcggccgccatctttaccgtgcagctggatgactacctgaacggccgggccgtgcagcaccgtgaggtccagggcttcgagtcggccaccttcctaggctacttcaagtctggcctgaagtacaagaaaggaggtgtggcatcaggattcaagcacgtggtacccaacgaggtggtggtgcagagactcttccaggtcaaagggcggcgtgtggtccgtgccaccgaggtacctgtgtcctgggagagcttcaacaatggcgactgcttcatcctggacctgggcaacaacatccaccagtggtgtggttccaacagcaatcggtatgaaagactgaaggccacacaggtgtccaagggcatccgggacaacgagcggagtggccgggcccgagtgcacgtgtctgaggagggcactgagcccgaggcgatgctccaggtgctgggccccaagccggctctgcctgcaggtaccgaggacaccgccaaggaggatgcggccaaccgcaagctggccaagctctacaaggtctccaatggtgcagggaccatgtccgtctccctcgtggctgatgagaaccccttcgcccagggggccctgaagtcagaggactgcttcatcctggaccacggcaaagatgggaaaatctttgtctggaaaggcaagcaggcaaacacggaggagaggaaggctgccctcaaaacagcctctgacttcatcaccaagatggactaccccaagcagactcaggtctcggtccttcctgagggcggtgagaccccactgttcaagcagttcttcaagaactggcgggacccagaccagacagatggcctgggcttgtcctacctttccagccatatcgccaacgtggagcgggtgcccttcgacgccgccaccctgcacacctccactgccatggccgcccagcacggcatggatgacgatggcacaggccagaaacagatctggagaatcgaaggttccaacaaggtgcccgtggaccctgccacatatggacagttctatggaggcgacagctacatcattctgtacaactaccgccatggtggccgccaggggcagataatctataactggcagggtgcccagtctacccaggatgaggtcgctgcatctgccatcctgactgctcagctggatgaggagctgggaggtacccctgtccagagccgtgtggtccaaggcaaggagcccgcccacctcatgagcctgtttggtgggaagcccatgatcatctacaagggcggcacctcccgcgagggcgggcagacagcccctgccagcacccgcctcttccaggtccgcgccaacagcgctggagccacccgggctgttgaggtattgcctaaggctggtgcactgaactccaacgatgcctttgttctgaaaaccccctcagccgcctacctgtgggtgggtacaggagccagcgaggcagagaagacgggggcccaggagctgctcagggtgctgcgggcccaacctgtgcaggtggcagaaggcagcgagccagatggcttctgggaggccctgggcgggaaggctgcctaccgcacatccccacggctgaaggacaagaagatggatgcccatcctcctcgcctctttgcctgctccaacaagattggacgttttgtgatcgaagaggttcctggtgagctcatgcaggaagacctggcaacggatgacgtcatgcttctggacacctgggaccaggtctttgtctgggttggaaaggattctcaagaagaagaaaagacagaagccttgacttctgctaagcggtacatcgagacggacccagccaatcgggatcggcggacgcccatcaccgtggtgaagcaaggctttgagcctccctcctttgtgggctggttccttggctgggatgatgattactggtctgtggaccccttggacagggccatggctgagctggctgcctgaggaggggcagggcccacccatgtcaccggtcagtgccttttggaactgtccttccctcaaagaggccttagagcgagcagagcagctctgctatgagtgtgtgtgtgtgtgtgtgttgtttcttttttttttttttacagtatccaaaaatagccctgcaaaaattcagagtccttgcaaaattgtctaaaatgtcagtgtttgggaaattaaatccaataaaaacattttgaagtgtgaaaaaaaaaaaaaaaaaaaaaaaaaaaaaaaaaaaaaaaaaaaaaaaaaaaaaaaaaaaaaaaaaaaaaa

SEQ ID NO: 377 - DNA, 2764 bp, Homo sapiens
ctctaaagcttagagccaagatggcgggatccaggcaaaggggtctccgggccagagttcggccgctgttctgcgccttgctgctgtcactcggtcgcttcgtccggggcgacggcgtgggaggagaccccgcggtcgcgttgccacatcgccgtttcgagtacaaatacagcttcaaggggccgcacctggtgcagagcgacgggaccgtgcccttctgggcccacgcggggaatgctattccaagttcagatcaaattcgagtagcaccatctttaaaaagccaaagaggctcagtgtggacaaagacaaaagcggcctttgagaactgggaagttgaggtgacatttcgagtgactggaagaggtcgaattggagctgatggcctagcaatttggtatgcagaaaatcaaggcttggagggccctgtgtttggatcagctgatctgtggaatggtgttggaatattttttgattcttttgacaatgatggaaagaaaaataatcctgctatagtaattataggcaacaatggacaaatccattatgaccatcaaaatgacggggctagtcaagctttggcaagttgccagagggacttccgcaacaaaccctatcctgtccgagcaaagattacctattaccagaacacactgacagtaatgatcaataatggctttacaccagataaaaatgattatgaattttgtgccaaagtggaaaatatgattatccctgcacaagggcattttggaatatctgctgcaactggaggtcttgcagatgaccatgatgtcctttcttttctgactttccagttgactgaacctggaaaagagccgcccacaccagataaagaaatttcggaaaaggaaaaagaaaagtatcaggaggaatttgagcactttcaacaagaattggataaaaaaaaagaggaattccagaagggccaccccgacctccaagggcagcctgcggaggaaatatttgagagtgtaggagatcgagagctaagacaagtctttgaaggacagaatcgtattcatcttgaaatcaagcagctgaaccggcagttagatatgattcttgatgaacagagaagatatgtctcttccttaacagaggaaatctctaaaagaggagcaggaatgcctgggcagcatgggcagattactcaacaagaactggatactgttgtgaaaactcagcatgagattctgagacaagtaaatgaaatgaaaaattccatgagtgaaaccgtcagactggtcagtggaatgcagcaccctggctctgctggaggcgtctatgagacaacacagcacttcattgacatcaaagagcacctgcacatagtaaagagggacatagataacttagtgcagcgaaatatgccatcaaatgaaaagccgaaatgcccagaactaccaccatttccatcatgtttgtctacggtccacttcattatatttgttgtggtgcaaactgtattattcattggttatatcatgtataggtctcagcaagaagcagctgccaaaaaattcttttgactaccattttcctgtgtacttcatctatttgtgtacaaaatgatgtcgttttgagggaatttaagtatttaaattgcttcatagtctaaattattaattttcttaataaaataactgtttaaacattgatttgcagttaagaataaaccttaaagcaaagacaaccacattttaatttgttcacagtatgtaaatctgtctaaatttcagtgaatttctggtcagtatgatgcagcctctgagcagatattgaccagtaagagggtaaataaagtgggggcaacccctggatatgaatgttaccccctaagtctccaatattgcaggtttccctgtataacgtaaacacacttgccctcatgcctcccagaatatgaggtctaattaagaagtcccatcaggtttattttgtaaccaaagtcttttttagaggtcagacttcctaatcaaaggcctgggcctgcagtcctttcatcttaatgcaacttcctttgaaatcaaagaatattttgtctgagagctttaaggatctggtaatagacttcaaaatgttaagtgaaattttttttcctctatttatcaatgatatatttcacttttaaaggaaattttggaggaaaatatagctgctttttgcctaaaaaaccttgtgggtggaaatattcctctgagaatggcttttataggtattttgcctggtaatgtattcattcatgattgcccatattcttgaatgtttcttcattccaatggggtcaggtcaatattatgaaaataatttttatatttatatttgtaactaagaatttatttctccctttactacacgatgtaaattcacgtcaaattcgatgatctgaggatttaaattcacaaaacctgccactacattctggtttacattagttacttcatgctggctggggttagtgaccatttgcatactcttttaaatcaaggaggctgtagtagaggcagttttaagattcttgaaggcaaaatttgaaaaacagtgaatacttctaattgtttccttttagtgccagaactaagacattgtgaagcacttgttagtaaacttaaccttgaaatgtcagactggaaggagtttttatgtctttgtgcatacttctgggtattacagaaacagtctgtaaataacattttaagatgcaaatttaattctgttcacagctgatttatactgattt

SEQ ID NO: 378 - DNA, 2617 bp, Homo sapiens
tcttccgggcgccgcagcttcctgccaagcaccgcgcagccgcctccgccgcaggatcccccggtgcaggcctccgtgctggtgcggatcctggagctcagccgcgcgcgccctgcccgatcctgtgccgacccaccgcactatgcgcgccgtgccgctgcccgccccgctcctgccgctgctgctgctcgcgctcctggccgctcccaccgcccgcgccagcagagccgagtccgtctccgcgccgcggcccgaacccgagcgcgagtcgcggccaccgcccggcccggggcccgggaacaccacccggtttgggtctggggcggcgggcggcagcggcagctccaacagcagcggcgacgccttggtgacccgcatttccatcctcctccgcgacctacccaccctcaaggcagccgtgatcgtggcgttcgcctttaccaccctcctcatcgcctgcctgctgctgcgcgtcttcaggtcgggaaagaggttaaagaagacacgcaagtatgatatcatcaccactccagcagagcgagtggaaatggcgccactaaatgaagaggatgatgaagatgaggactccacagtattcgacatcaaatacaggtaaaacctgtttcccagcctggtggcatcctgtggaaagttggtcagctgcaacctggggtgtgaaggactggacctggaagccctcttgcgtcggaggtgttgaaaccaaaacgaacgttatgtataaaaccccagctccatcgtgcgtgtcaggcatctgctcagactgtcactggcaagctcgtttccacgtcaccacaatggagttgcttctgccaccctttgggcatccctttaaagtgccccctacttctactccccatgtaagaggctttgtgccttgctaaggagcaaagggtagaaacatgttgattttaaagaagtttttttaagacaattgttgacaatagtaaaagagatcaggaggatcaagaatctaaaacaagcctgaaggatgtccaactgtgtatttagaatttccgacattcttctctactggatctacacattggaccccatctgatcctttgctgcttttttggcttggtcaggtcctggcctcattttggcgttacctgtgtcagagttcaaggtggatgtgcttagagctggtcagccccttccagacctggacacgtctgtggctccttttctttcttcctttttttttttaaaaaaaaaaaaggttcagcagaaatcagcgtggctagttcacaaagaatttccagtatcagggaaaaactgtgcgtgtgtgtgtgtgtgtgtgtgcacgtgtgtgcgtgtgcacgtgtgtgatacctataaaacagtttctccttctctgaagggaaaggaaagtgctaggcagcctgtgattagcaacattctttgtgcttttttgttgttcctctgctctgtcacagttctacgttgtttgccttagaaatgtaatttttaaaaaccattttaaaaatgaacggtgatttggctggctggaaaaaatcacactgtcaggggactatatttgaagtcagtctagacggggctggactaggaacccacctggacccaggagaccccacaggacccaggaggtccctgccggaaggcagaggttcaggtgagagtggctcacctctgagctggtgaagtgaggacttgcctgtgacatgacccagggatctgctgctggcttctggagacagggccttgggctgacttctcaggttgattgaggcctcctgactagcggtgttcccaggctagaggtgattggctgcaacaaagatgcttctattagtctattagcagtgccttcgggaccctgggattttgctctctctagaaaggtgttttttatttttttattttttatctcccccttttttcctggctttgctccagggtttgtgtatttgcctgtttattgtcctgctctttttttttttggatgaaaactccagcctttcctgactcacctccatcttcggttcttcagttttctgagaagagttgggatatgtgggaaggggcatgggagctcggcagcctccgcctgccaggaaggcagtttcgcctctgcaggaaagagcagagcccgtgggaagccctgggtgagggtggcgcagccggcccagcacgcatggtattgccagccacggggggcctgcgtgtagtctctgctccctgcatttcaccttctttgttgactttccttccctgttttcccccatctgtttgccagaggggtgggactggcaacagaacagccgtggctgctttatctctcctctccacggtgtactcaggcctgagtggtgactcacgggagcctggccacctcgcagctgttcgccccctcaacctttgaactggaactgctggctcacacagggttttcgacaactgcagctgaatctcatggaaaagctggattcctctgccttacgcagaaacacccgggctccatctgccaggtgcttgccactggtcctggcagaaatggcggctgctgaaagtgaccttccaaatccttggtggcacttcagcgccacaggctctccaataaaaaccctttacacac

SEQ ID NO: 379 - DNA, 6492 bp, Homo sapiens
tttctgtgaagcagaagtctgggaatcgatctggaaatcctcctaatttttactccctctccccgcgactcctgattcattgggaagtttcaaatcagctataactggagagtgctgaagattgatgggatcgttgccttatgcatttgttttggttttacaaaaaggaaacttgacagaggatcatgctgtacttaaaaaatacaacatcacagaggaagtagactgatattaacaatacttactaataataacgtgcctcatgaaataaagatccgaaaggaattggaataaaaatttcctgcatctcatgccaagggggaaacaccagaatcaagtgttccgcgtgattgaagacaccccctcgtccaagaatgcaaagcacatccaataaaatagctggattataactcctcttctttctctgggggccgtggggtgggagctggggcgagaggtgccgttggcccccgttgcttttcctctgggaaggatggcgcacgctgggagaacagggtacgataaccgggagatagtgatgaagtacatccattataagctgtcgcagaggggctacgagtgggatgcgggagatgtgggcgccgcgcccccgggggccgcccccgcaccgggcatcttctcctcccagcccgggcacacgccccatccagccgcatcccgggacccggtcgccaggacctcgccgctgcagaccccggctgcccccggcgccgccgcggggcctgcgctcagcccggtgccacctgtggtccacctgaccctccgccaggccggcgacgacttctcccgccgctaccgccgcgacttcgccgagatgtccagccagctgcacctgacgcccttcaccgcgcggggacgctttgccacggtggtggaggagctcttcagggacggggtgaactgggggaggattgtggccttctttgagttcggtggggtcatgtgtgtggagagcgtcaaccgggagatgtcgcccctggtggacaacatcgccctgtggatgactgagtacctgaaccggcacctgcacacctggatccaggataacggaggctgggatgcctttgtggaactgtacggccccagcatgcggcctctgtttgatttctcctggctgtctctgaagactctgctcagtttggccctggtgggagcttgcatcaccctgggtgcctatctgggccacaagtgaagtcaacatgcctgccccaaacaaatatgcaaaaggttcactaaagcagtagaaataatatgcattgtcagtgatgtaccatgaaacaaagctgcaggctgtttaagaaaaaataacacacatataaacatcacacacacagacagacacacacacacacaacaattaacagtcttcaggcaaaacgtcgaatcagctatttactgccaaagggaaatatcatttattttttacattattaagaaaaaaagatttatttatttaagacagtcccatcaaaactcctgtctttggaaatccgaccactaattgccaagcaccgcttcgtgtggctccacctggatgttctgtgcctgtaaacatagattcgctttccatgttgttggccggatcaccatctgaagagcagacggatggaaaaaggacctgatcattggggaagctggctttctggctgctggaggctggggagaaggtgttcattcacttgcatttctttgccctgggggctgtgatattaacagagggagggttcctgtggggggaagtccatgcctccctggcctgaagaagagactctttgcatatgactcacatgatgcatacctggtgggaggaaaagagttgggaacttcagatggacctagtacccactgagatttccacgccgaaggacagcgatgggaaaaatgcccttaaatcataggaaagtatttttttaagctaccaattgtgccgagaaaagcattttagcaatttatacaatatcatccagtaccttaagccctgattgtgtatattcatatattttggatacgcaccccccaactcccaatactggctctgtctgagtaagaaacagaatcctctggaacttgaggaagtgaacatttcggtgacttccgcatcaggaaggctagagttacccagagcatcaggccgccacaagtgcctgcttttaggagaccgaagtccgcagaacctgcctgtgtcccagcttggaggcctggtcctggaactgagccggggccctcactggcctcctccagggatgatcaacagggcagtgtggtctccgaatgtctggaagctgatggagctcagaattccactgtcaagaaagagcagtagaggggtgtggctgggcctgtcaccctggggccctccaggtaggcccgttttcacgtggagcatgggagccacgacccttcttaagacatgtatcactgtagagggaaggaacagaggccctgggcccttcctatcagaaggacatggtgaaggctgggaacgtgaggagaggcaatggccacggcccattttggctgtagcacatggcacgttggctgtgtggccttggcccacctgtgagtttaaagcaaggctttaaatgactttggagagggtcacaaatcctaaaagaagcattgaagtgaggtgtcatggattaattgacccctgtctatggaattacatgtaaaacattatcttgtcactgtagtttggttttatttgaaaacctgacaaaaaaaaagttccaggtgtggaatatgggggttatctgtacatcctggggcattaaaaaaaaaatcaatggtggggaactataaagaagtaacaaaagaagtgacatcttcagcaaataaactaggaaatttttttttcttccagtttagaatcagccttgaaacattgatggaataactctgtggcattattgcattatataccatttatctgtattaactttggaatgtactctgttcaatgtttaatgctgtggttgatatttcgaaagctgctttaaaaaaatacatgcatctcagcgtttttttgtttttaattgtatttagttatggcctatacactatttgtgagcaaaggtgatcgttttctgtttgagatttttatctcttgattcttcaaaagcattctgagaaggtgagataagccctgagtctcagctacctaagaaaaacctggatgtcactggccactgaggagctttgtttcaaccaagtcatgtgcatttccacgtcaacagaattgtttattgtgacagttatatctgttgtccctttgaccttgtttcttgaaggtttcctcgtccctgggcaattccgcatttaattcatggtattcaggattacatgcatgtttggttaaacccatgagattcattcagttaaaaatccagatggcaaatgaccagcagattcaaatctatggtggtttgacctttagagagttgctttacgtggcctgtttcaacacagacccacccagagccctcctgccctccttccgcgggggctttctcatggctgtccttcagggtcttcctgaaatgcagtggtgcttacgctccaccaagaaagcaggaaacctgtggtatgaagccagacctccccggcgggcctcagggaacagaatgatcagacctttgaatgattctaatttttaagcaaaatattattttatgaaaggtttacattgtcaaagtgatgaatatggaatatccaatcctgtgctgctatcctgccaaaatcattttaatggagtcagtttgcagtatgctccacgtggtaagatcctccaagctgctttagaagtaacaatgaagaacgtggacgtttttaatataaagcctgttttgtcttttgttgttgttcaaacgggattcacagagtatttgaaaaatgtatatatattaagaggtcacgggggctaattgctggctggctgccttttgctgtggggttttgttacctggttttaataacagtaaatgtgcccagcctcttggccccagaactgtacagtattgtggctgcacttgctctaagagtagttgatgttgcattttccttattgttaaaaacatgttagaagcaatgaatgtatataaaagcctcaactagtcatttttttctcctcttcttttttttcattatatctaattattttgcagttgggcaacagagaaccatccctattttgtattgaagagggattcacatctgcatcttaactgctctttatgaatgaaaaaacagtcctctgtatgtactcctctttacactggccagggtcagagttaaatagagtatatgcactttccaaattggggacaagggctctaaaaaaagccccaaaaggagaagaacatctgagaacctcctcggccctcccagtccctcgctgcacaaatactccgcaagagaggccagaatgacagctgacagggtctatggccatcgggtcgtctccgaagatttggcaggggcagaaaactctggcaggcttaagatttggaataaagtcacagaattaaggaagcacctcaatttagttcaaacaagacgccaacattctctccacagctcacttacctctctgtgttcagatgtggccttccatttatatgtgatctttgttttattagtaaatgcttatcatctaaagatgtagctctggcccagtgggaaaaattaggaagtgattataaatcgagaggagttataataatcaagattaaatgtaaataatcagggcaatcccaacacatgtctagctttcacctccaggatctattgagtgaacagaattgcaaatagtctctatttgtaattgaacttatcctaaaacaaatagtttataaatgtgaacttaaactctaattaattccaactgtacttttaaggcagtggctgtttttagactttcttatcacttatagttagtaatgtacacctactctatcagagaaaaacaggaaaggctcgaaatacaagccattctaaggaaattagggagtcagttgaaattctattctgatcttattctgtggtgtcttttgcagcccagacaaatgtggttacacactttttaagaaatacaattctacattgtcaagcttatgaaggttccaatcagatctttattgttattcaatttggatctttcagggattttttttttaaattattatgggacaaaggacatttgttggaggggtgggagggaggaagaatttttaaatgtaaaacattcccaagtttggatcagggagttggaagttttcagaataaccagaactaagggtatgaaggacctgtattggggtcgatgtgatgcctctgcgaagaaccttgtgtgacaaatgagaaacattttgaagtttgtggtacgacctttagattccagagacatcagcatggctcaaagtgcagctccgtttggcagtgcaatggtataaatttcaagctggatatgtctaatgggtatttaaacaataaatgtgcagttttaactaacaggatatttaatgacaaccttctggttggtagggacatctgtttctaaatgtttattatgtacaatacagaaaaaaattttataaaattaagcaatgtgaaactgaattggagagtgataatacaagtcctttagtcttacccagtgaatcattctgttccatgtctttggacaaccatgaccttggacaatcatgaaatatgcatctcactggatgcaaagaaaatcagatggagcatgaatggtactgtaccggttcatctggactgccccagaaaaataacttcaagcaaacatcctatcaacaacaaggttgttctgcataccaagctgagcacagaagatgggaacactggtggaggatggaaaggctcgctcaatcaagaaaattctgagactattaataaataagactgtagtgtagatactgagtaaatccatgcacctaaaccttttggaaaatctgccgtgggccctccagatagctcatttcattaagtttttccctccaaggtagaatttgcaagagtgacagtggattgcatttcttttggggaagctttcttttggtggttttgtttattataccttcttaagttttcaaccaaggtttgcttttgttttgagttactggggttatttttgttttaaataaaaataagtgtacaataagtgtttttgtattgaaagcttttgttatcaagattttcatacttttaccttccatggctctttttaagattgatacttttaagaggtggctgatattctgcaacactgtacacataaaaaatacggtaaggatactttacatggttaaggtaaagtaagtctccagttggccaccattagctataatggcactttgtttgtgttgttggaaaaagtcacattgccattaaactttccttgtctgtctagttaatattgtgaagaaaaataaagtacagtgtgagatactg

SEQ ID NO: 380 - DNA, 3322 bp, Homo sapiens
atttttactagggagcagtttccccgcgcgacagttcgggagcgcgcaggcagtcgcgcgcacacacgcacgcaggcacacacacacacacacacacacacactttcgcacacacaaacacgctaggacgctcgtcttcgctactgcatccccgaaccagcagagcgaagctactgcgggttctgttaacctcagcatcgtggggcgaagcagagccattgtgcatcaaggagaggccggtgcctgcgctgccgtctctggcacctaacccagcagaccgctcaccccatcggctggaatgcttgctgattcctctgcacacttctaaggctgagaacctgaggaacccagctggaaaatgccgtctgaacgctgcctcagtattcaagaaatgctgacaggccagaggctctgccactccgaatctcacaatgacagtgtcctggcagcgctgaatcagcagaggagtgatggcatcctctgcgacatcaccctgattgctgaggaacagaaattccatgctcacaaggcagtcctagcagcatgcagtgactatttccgggcaatgttcagtctttgtatggtggaaagtggagctgatgaggttaatttgcacggtgtgaccagccttggcttaaagcaggctctggagtttgcatacacaggacagattttgctggagccaggtgtgatccaggatgtgctagcagcgggcagtcacctacagctgttggagcttctcaatttatgctcccactatctcatccaggaattaaatagctttaattacttggatctgtacagacttgctgacctctttaacctcactttgttggagaaggcagtgatcgatttcttagtgaaacatctctctgaactcctgaagagccgcccagaagaagttctaacgcttccctattgcctgcttcaggaggtgctgaagagcgaccgcctgacctccctgagtgaagagcagatctggcagctagctgtgaggtggttggaacacaactgccactaccagtacatggacgagctcctgcaatacatccgctttggcctaatggatgtggatactctccatacagttgccctgtcccacccccttgtccaagcaagtgagactgcaacagcccttgtcaacgaggccctggaataccaccagagcatctatgcacagcctgtctggcagactcgcaggaccaaaccacgattccagtcagacactctgtatatcattggtgggaaaaagcgcgaggtctgcaaggtcaaggaacttcggtacttcaatcctgttgatcaggagaatgctctcatagctgccattgccaactggagtgagctggcttccatgcctgtgggaaggagccaccattgtgtggcagtcatgggggacttcctgtttgtggcaggaggggaagttgagcatgccagtggccggacgtgtgctgtgaggactgcctgtcgctatgacccccgcagtaattcctgggcagagatagcacccatgaaaaactgccgggagcattttgtgctgggtgccatggaggaatacctctatgcagttgggggcagaaatgaactgcgccaggttctgcctacagttgagcgatattgccccaagaagaacaaatggacttttgttcagtcctttgacagatccctttcatgccatgctggatatgtggctgatggtcttctttggatatcaggtggagtaactaatacggcacaatatcagaacaggctaatggtgtatgaacctaaccagaataagtggataagccgtagccccatgctgcagagaagggtctaccattccatggctgctgtacaaaggaagctttatgttcttggaggcaatgacctagactacaataatgaccggatccttgtgcgccatatagattcttacaacatagacactgaccagtggacacgttgtaatttcaacctgctgactggccaaaatgagtctggagttgctgtccataatgggagaatatatttagttggtggatattcaatttggacaaatgagcctctggcttgtatccaggtactggatgtaagcagagaaggcaaagaagaagtattctatgggcctacactcccttttgcttccaatggaatagcagcatgcttccttccagctccatattttacatgccctaaccttcaaactcttcaagtgcctcatcacaggattggcaccatctgaaaagccaagccatcatgaacaggaggaaaacatagctctgactgttggatactgggcatgaaaagactcagtgctccatgcttccttgtcttgctttataggtcttatattcggataaatttaagcaaaaaatgaacaattttctaaaatacgttattgaaaactcgtcacccttctcagtgtatgtcaacattcaatatgtatgacttttattgtggtatagcttagtgccaatttaaggtatattgtgttccatgggtctttagagcattctttgtacactttttctaatcagcactgtcttaagacaacacaacactgttagtaaggcaatttattggacacaatggcatcgatgatcttaaaaaaatatatattctgtacttaatccctttattatttaaagccgggcttgtaatttttctttttaaaatttaacattatgcagccctgctcagtagagactcactcagcattatgacatcataaatttttaaatgccatattttattcaaggtgatacgaataataatagacatacactggaacagcagttgttgaaatacccagatttttcaccttggttactctgaccttgggtcagaacctaactttacagtgcttcagttttcccaccttttaaggaggataattactgatttccacgttaatttaaaagaacattatgaggattaggcgaacactttgtaatactttgcccaagaaaaagaaaaatgttgttactgaaattataaggtattttattgtctttagaaccttgtaattgaacagggagattatttttgaagtttaaaaattactagatagaatttggaaacatgttgtggaataaatgattctaaaaagcatgtgaaagagacacacaatgaggaaatagggagtttctcaaaatctaaacttgtacaggtatctaaacttgcctcaagtaactctcagatgtcttatttaaaatcatttagtgaaaaatgacatttaaagctaaaaaataatttagttgtactaattatggtaccataaagtgctttgacataaatttgaacctagaattggcagttctaataaaagtttttccactttgtt

SEQ ID NO: 381 - DNA, 1775 bp, Homo sapiens
gtgcaaagtgctgggttctgggtttctggattcgcgggccgttcacacgtagcctgtgccggctcctcgggtgagtccgtccgcgcgcggtgccccgggacggcctaggctgccgggggtccggggccccaggcattccgggctgcagattgacggggatcccggatgcaccgcgcgcccccgcgccctcaccgacgggtccagacctggtgggaagaaggtgcggggacgggtccctgaggatcccgatgcctacgagccaagatgctcagctttataggtgtgacctacacatgtgacttcacctcagttttgtgatccgtaaaatggacaaattcgaagctacttcacagtgctgttgagaggattaaatgaaacaatgcttgtaaagctctttgcaggagggagcctcggaagcagggcctggccggcagagcacacctgctgtcaccagggaccacaggcagcatgaagacccccgtggagctggccgtcagtgggatgcagaccctcggccttcagcaccgctgccgaggtggctaccgggtcaaggccaggacgtcatatgtggatgagactctgtttggcagcccagcaggcacccggcctaccccaccggacttcgatccgccctgggtggagaaggctaacagaaccagaggcgtgggcaaggaggcatcgaaggccttgggggcaaaggggagctgtgagaccaccccctcaaggggcagcacccccaccctcacaccaaggaagaagaacaaatacagacccatcagccacaccccgtcttactgtgatgagtcgctgtttggctcccgatctgaaggcgccagcttcggggccccgcggatggcgaagggggatgccgcaaagctccgtgctctcttgtggacgccaccacctacccccaggggtagccactcgccccgccccagggaggcaccactgcgagccattcacccagctggtccctccaagacagagccggggccagcggcagactcccagaagttatctatgggtgggttacactcttcacgccccctgaagcggggactttcccattccctcacccacctgaatgtccccagcactggtcatccagccaccagtgccccccacacaaatgggcctcaggatctcaggccttccacgtcaggggtgaccttccggagccccctggtgacttccagggctcgctcagttagcatttcagtgccatctaccccacgacgaggtggggccacccagaaaccaaagcccccttggaaatgatactctttcatcagggttgcctatggggccacggcgacaggtatggccccttgccagggtaggaggacattcatcacccagggaaccccaggtattaaagaagcccctgtgggggcagacagacatagcaggggtgggcagtgcctccctttatcctgacaatctctagtcgattcttgcctttttctcccgattgcggatttgggggccacctctaagatgcctctctccagccctgtctcaaccatactccaaattagtgccaacccaggggcctggcacctcccacatcatccattgtcttgctgccaagtgcgaataaacggcgtgattgccaacctggagggtcccctcttatcccttcaagccaagcttcctgctcaggattagtttccagctaagtctgcaagccctagaggagtttttccaggctgtctgtgaagcctggggaacacaacggcaactgggagatttgtgagtgaacactgtttcatctt

SEQ ID NO: 382 - DNA, 1065 bp, Homo sapiens
atgtcccgcctgctgcatgcagaagagtgggctgaagtgaaggagttgggagaccaccatcgccagccccagccgcatcatctcccgcaaccgccgccgccgccgcagccacctgcaactttgcaggcgagagagcatcccgtctacccgcctgagctgtccctcctggacagcaccgacccacgcgcctggctggctcccactttgcagggcatctgcacggcacgcgccgcccagtatttgctacattccccggagctgggtgcctcagaggccgctgcgccccgggacgaggtggacggccggggggagctggtaaggaggagcagcggcggtgccagcagcagcaagagccccgggccggtgaaagtgcgggaacagctgtgcaagctgaaaggcggggtggtggtagacgagctgggctgcagccgccaacgggccccttccagcaaacaggtgaatggggtgcagaagcagagacggctagcagccaacgccagggagcggcgcaggatgcatgggctgaaccacgccttcgaccagctgcgcaatgttatcccgtcgttcaacaacgacaagaagctgtccaaatatgagaccctgcagatggcccaaatctacatcaacgccttgtccgagctgctacaaacgcccagcggaggggaacagccaccgccgcctccagcctcctgcaaaagcgaccaccaccaccttcgcaccgcggcctcctatgaagggggcgcgggcaacgcgaccgcagctggggctcagcaggcttccggagggagccagcggccgaccccgcccgggagttgccggactcgcttctcagccccagcttctgcgggagggtactcggtgcagctggacgctctgcacttctcgactttcgaggacagcgccctgacagcgatgatggcgcaaaagaatttgtctccttctctccccgggagcatcttgcagccagtgcaggaggaaaacagcaaaacttcgcctcggtcccacagaagcgacggggaattttccccccattcccattacagtgactcggatgaggcaagttag

SEQ ID NO: 383 - DNA, 1614 bp, Homo sapiens
agtaggctggagccggggtcagctttggcaccttcctccagtcagtggccaactcctggctcagtggggattgtgctcgtcccctccgttcccctccagtcttcctcccgctaccggaacgagcctcgcgcttggcaggctgaggaggagcaaagaaagcaggattaaagagaaggaagacctggctaggtctgggtggcgtctgcagtgccagaaagggaggcggtggcggcggcggctgcgaccacggccgcgcgggacgtgaggcccgagagcaaccgacgggcagcggcggccgctccagcgccccgcaccggggccgttagtcagcagaacgcgagctcttgtggaggagcagggccggcgcgaggcgagactcgggagcgtgagcggggcccctggggcgccgccgtccttcttcgccccggcgccgggggctgtagccctggtccccgctcctctgtcgggccagtctgcaggcggagagagtcggacggcgcccggagcgcggatctcgccttgtggaggacagcgcgtcggctgcggttctctctcgaccccttctgcccggcgcttcggcccgggccgctcaggtgcagagcatgaataatctttcatttagtgagctatgttgcctcttctgctgtccaccttgtccagggaagattgcttcaaaattagcgtttttgccacctgatccaacttacacactgatgtgtgatgaaagcggaagccgttggactttacatctgtctgaacgagcagactggcagtattcttctagagaaaaagatgctattgagtgtttcatgactagaaccagtaaaggcaacagaattgcttgtatgtttgtacgttgttcacccaatgcgaaatacactttactcttctcacatggaaatgctgttgatcttggtcaaatgagcagcttttacataggactaggatcacggattaattgtaatatattctcatatgattattctggatatggtgccagttccgggaaacccacagagaagaacctctatgcagacattgaagctgcttggcttgctcttaggacaagatatggcattcgccctgaaaatgtgattatatatggccaaagtatagggacagtaccgtctgtggatcttgctgctcgatatgagagtgctgctgttattcttcattctcctctgacttcgggaatgcgagttgcctttcctgataccaagaagacctactgttttgatgcattcccaaacattgacaaaatctctaagataacctctccagtattaataattcatgggactgaagatgaagtcattgacttttcacatggcctcgcattgtttgaacgttgccaaagacctgtggagcctctctgggttgaaggagcaggtcacaatgatgtggaactttatggacagtatcttgaaaggttgaaacagtttgtgtcacaggaactggtgcagaaacataaagaagggaagtgattttctcaaggtctacagttttcaatgacggtactatgtattccattatcttctctttaccaaacttaactggattaatataccaatgatcctttcaaattatatgacataaacttatttgctctccaaa

SEQ ID NO: 384 - DNA, 2098 bp, Homo sapiens
ctggcggggaggaacctggaccctgctccagtgctggggcggaggcgggggagacgcgggccgcggggcgcaaacttggggtcgtcctcaggtgcacctccaggtgtttatcatgggctactcggtggtggctggagccgcgggaagactcctctttggctatgacagctttggcaacatgtgtggcaagaagaactcccccgtggaaggggcccctctttcagggcaggacatgaccctaaaaaaacacgtgttctttatgaattcctgcaacctggaagtcaaaggtacgcagctcaaccgcatggccctctgtgtatccaactgccctgaagagcagcttgactccctggaagaggtccagttctttgcaaacaccagtgggtccttcctgtgtgtttatagtttgaattccttcaactatacccacagtccaaaagcagactcactgtgtcccaggctaccagttcctccaagcaagtcatttcccttatttaaccgatgtgtccctcaaacacctgagtgctactccctatttgcatctgttttgataaatgatgttgacaccctccaccgaattctaagtggaatcatgtcgggaagagatacaatccttggcctgtgtatcctcgcattagccttgtctttggccatgatgtttaccttcagattcatcaccacccttctggttcacattttcatttcattggttattttgggattgttgtttgtctgcggtgttttatggtggctgtattatgactataccaacgacctcagcatagaattggacacagaaagggaaaatatgaagtgcgtgctggggtttgctatcgtatccacaggcatcacggcagtgctgctcgtcttgatttttgttctcagaaagagaataaaattgacagttgagcttttccaaatcacaaataaagccatcagcagtgctcccttcctgctgttccagccactgtggacatttgccatcctcattttcttctgggtcctctgggtggctgtgctgctgagcctgggaactgcaggagctgcccaggttatggaaggcggccaagtggaatataagcccctttcgggcattcggtacatgtggtcgtaccatttaattggcctcatctggactagtgaattcatccttgcgtgccagcaaatgactatagctggggcagtggttacttgttatttcaacagaagtaaaaatgatcctcctgatcatcccatcctttcgtctctctccattctcttcttctaccatcaaggaaccattgtgaaagggtcatttttaatctctgtggtgaggattccgagaatcattgtcatgtacatgcaaaacgcactgaaagaacagcagcatggtgcattgtccaggtacctgttccgatgctgctactgctgtttctggtgtcttgacaaatacctgctccatctcaaccagaatgcatatactacaactgctattaatgggacagatttctgtacatcagcaaaagatgcattcaaaatcttgtccaagaactcaagtcactttacatctattaactgctttggagacttcataatttttctaggaaaggtgttagtggtgtgtttcactgtttttggaggactcatggcttttaactacaatcgggcattccaggtgtgggcagtccctctgttattggtagctttttttgcctacttagtagcccatagttttttatctgtgtttgaaactgtgctggatgcacttttcctgtgttttgctgttgatctggaaacaaatgatggatcgtcagaaaagccctactttatggatcaagaatttctgagtttcgtaaaaaggagcaacaaattaaacaatgcaagggcacagcaggacaagcactcattaaggaatgaggagggaacagaactccaggccattgtgagatagatacccatttaggtatctgtacctggaaaacatttccttctaagagccatttacagatagaagatgagaccactagagaaaagttagtgaatttttttttaaaagacctaataaaccctattcttcctcaaaaaaaaaaaaaaaaaaaaaaaaaaaaaaaaaaaaaaa

SEQ ID NO: 385 - DNA, 1329 bp, Homo sapiens
caccgaggtccccaagccctccgcaaaggacgtggagatcctggagcaagagagcgaagtcctcgagccatcagtcgagcaggacgcagagagccccgggctgtccacagctgcgggctttgagagtcctgagccaggcagagacgaccctgggccgtccgaagcgcaaagggcggaggtccaggggcagcatccccctccaggccctaagacctcctcctccaggtcaggctcggaagccccccacctgcgttttccgccgtgccccgaggctccccagcgtcccccggaggagcggttcatggagacgcccatcgagcgcgaaatccgccgcagctgcgaacgcgaggagagcctgcgccggagccggggcctgagcccgggccgcgcaggccgtgaactcgtcgagctgcgcgtgcggccggtgctcaacctgccgggtcctggccccgcgctcccgcgcgccctggagcgggcgcgggcgggcgcgcagatgcagcgggacatcgagcgggaggcccaccggcaggcggcgctggcgcgccccgcggtccccgagccgcgcgcccggtcgccgccgcagccgctgggcgaactcaagcgcttcttcgaggccgcggcggggagcggctcctcggcgggggcgggggacggcgcgggcccgcagaggctgccagagcctgggggacggccgcgctcggccgtgcagggcgggtgccgggtgctgggcagcgccccgccgcctttcactccgtcactgctggagcaggaggtgcgcgccgtgcgcgagcgcgagcaggaactgcagcgccagcggcgcagcgtctatggcaccgcggagttcaaggagcctacgccgagcctcaccgcgagcaggggcgacggaaagttggtggtgatctggcccccccgcagaaaggtctcggagaacggcctggagcaggaggagcgcaaaccttgaggtttgaaaaggctgggacccccggccggaagtaacgtacgcgtcagaggaacagggcggggggcgtctagcattaggcctggagaagggtcggctctctgcattggggaagatgaaatcgacttgcctttgtgaaattgaccagccccctctataaaacttacagtcccccattgggaaactgaccaccacccacaactccgccagtgaaactgcccagcccttctctgcctaattgcaaactgaactaccctctcccttgactgttaagagggccggagttaccgcctcgattgccccactccccccacccccaataaagcctcttctttcagggcaaaaaaaaaaaaaaaaaaaaaaaaaaaaaa

SEQ ID NO: 386 - DNA, 1940 bp, Homo sapiens
ggggcggtgcagaggcggcaggaagatggagttggggagttgcctggagggcgggagggaggcggcggaggaagagggcgagcctgaggtgaaaaagcggcgacttctgtgtgtggagtttgcctcggtcgcaagctgcgatgccgcagtggctcagtgcttcctggccgagaacgactgggagatggaaagggctctgaactcctacttcgagcctccggtggaggagagcgccttggaacgccgacctgaaaccatctctgagcccaagacctatgttgacctaaccaatgaagaaacaactgattccaccacttctaaaatcagcccatctgaagatactcagcaagaaaatggcagcatgttctctctcattacctggaatattgatggattagatctaaacaatctgtcagagagggctcgaggggtgtgttcctacttagctttgtacagcccagatgtgatatttctacaggaagttattcccccatattatagctacctaaagaagagatcaagtaattatgagattattacaggtcatgaagaaggatatttcacagctataatgttgaagaaatcaagagtgaaattaaaaagccaagagattattccttttccaagtaccaaaatgatgagaaaccttttatgtgtgcatgtgaacgtgtcaggaaatgagctttgccttatgacatcccatttggagagcaccagagggcatgctgcggaacgaatgaatcagttaaaaatggttttaaagaaaatgcaagaggctccagagtcagctacagttatatttgcaggagatacaaatctaagggatcgagaggttaccagatgtggtggtttacccaacaacattgtggatgtctgggagtttttgggcaaacctaaacattgccagtatacatgggatacacaaatgaactctaatcttggaataactgctgcttgtaaacttcgttttgatcgaatatttttcagagcagcagcagaagagggacacattattccccgaagtttggaccttcttggattagaaaaactggactgtggtagatttcctagtgatcactggggtcttctgtgcaacttagatataatattgtaaaatgcttttcaagtgtgggttttgccctgattgttgcaaatacaatttccaccttctggaaaggtaggtttgctgtggaggaaataatgtactagatcattgtcacagaaaaaccaactatgatttatggttgtgttttcagaattcaacattaaagattaatgtttatttaaacgaacacattcctgcattcaggatgtgaggccatttaataaaaagggcacaaagcctgtcagagttttcaacggtgcttatagctgccagctggattccaaacaggtaccacattgtctctgagctaatgtttatatttttccattcaggcaccgaaatagttaatatttgaaataagtcttcaaaagaaaacataagagattattgagttcttgggactggatcctttatttcataagttcagatcatcttaaatgaaaatgccatgattatctgcagttaagtagatgacagctattctacatcagacttgatttttgtcagctaattacataattggtaagctataattgaaaccttatggcttaaaattccttaactcctttttgattcatgtttgtagtcatgttgtcaacagaggcaaagttaagcttgatgatggttaaaatcggtttgatagcaccatgggacatttttctaacaaaaataaatgcatgaagagacatagccttttagttttgctaattgtgaaatggaaatgctttacaggaagtaaatgcaaattacttttaagtgtgctttaaagaaaaatattttccccacaagagaaatttaaataaagaattttatttgtttaaaaaaaaaaaaaaaa

SEQ ID NO: 387 - DNA, 3128 bp, Homo sapiens
gtgaaccaggtgtcaatcccgaggaacaactgattataatccaaagtcgtctggatcagagtatggaggagaatcaggacttaaagaaggaactgctgaaatgtaaacaagaagccagaaacttacaggggataaaggatgccttgcagcagagattgactcagcaggacacatctgttcttcagctcaaacaagagctactgagggcaaatatggacaaagatgagctgcacaaccagaatgtggatctgcagaggaagctagatgagaggaaccggctcttgggagaatataaaaaagagctggggcagaaggatcgccttcttcagcagcaccaggccaagttagaagaagcactccggaaactctctgatgtcagttaccaccaggtggatctagagcgagagctagaacacaaagatgtcctcttggctcactgtatgaaaagagaggcagatgaggcgaccaactacaacagtcacaactctcaaagcaatggttttctccttccaacggcaggaaaaggagctacttcagtcagcaacagagggaccagcgacctgcagcttgttcgagatgctctccgcagcctgcgcaacagcttcagtggccacgatcctcagcaccacactattgacagcttggagcagggcatttctagcctcatggagcgcctgcatgttatggagacgcagaagaaacaagaaagaaaggttcgggtcaagtcacccagaactcaagtaggtagtgaataccgggagtcctggccccctaactcaaagttgcctcactcacagagctctccaactgtcagcagcacctgtactaaagtgctctatttcactgaccggtcacttacgcccttcatggtcaatataccaaagaggttggaggaggtgacgttaaaggattttaaagcagctattgatcgggaaggaaatcaccggtatcacttcaaagcactggatcctgagtttggcactgtcaaagaggagattttccatgatgatgatgccatccctggatgggaagggaaaattgtagcttgggtggaagaagaccatggagagaattaatgccaagtatcagattgagggcttatggaacctggtcactccctggctgcttcactcaggaaagggaactaaaaccagaatacactaagaagtttctagtttgtgtgccaaaacagaagcttctccaagcatgatggccacaggtcagtcctctttctgtgcctggcatatctggtacttaaaattctgtccaaatgtagaccatgggttcatctggagttccttgtccgtgggaacacagtgttctattctactctgaggacaacaaaccgaaggccttaaacgatggggatggatgatcccgcctctgtaggggcatggctgctattatctggaaattaggaattggatgcatcattcctgtgtgttacagtattattttaattggcctcaatggttgcagcaatcagagtcccagcgtttgtactcacagacaaggcaaaggtaccagcttttctgtttctttgaacctactgcaaaccaagaataactcatgaggtggtaccaaagatgaaagcccagacttcagtaatcttttgaaccagacgtggatggtgctgaattgttgcttggatggaaaaagggctgcccatgttgtgctacactatgctaaaactgtaatttagtaagaccttgggctgcctcttctgtcttaactggttctgcagcttgtccttttgcccacatagggcctatttcatgtactgttagttttctctggggactctttaactttagagccatttctttttcttcaaactgatgaacttttgtttgaaaggcataaggagtgaaaagctccttgaaaatccaggcgggtatggaaaggtgctgctacccatatctttttgactttctttgtttcatgactttaactcatggcatctcctttgtagtaaaaggagacagaccattaatttcagcatttctttgtgatttataagtactgagcatgaagtacttgtctgcccctcatttcaaggccagagttattttctatttatgtattagtctaggctgatcttttagggcacaatagaaaccatggggcgtggagcatgagttgtgaatggcagggatcattctgggtaaaaaaaacctagaatcatttctgatgtgcaacattgtcaagtgaagaagctaacagttcaactaccgagattatttgataacctgggttttctcattcatccatcaagcaccatcaaccagtcagccattattatttatatatgtattaccaaaagcagtctatctgcctgtgacctccaatgtacactgccaaacacaagagtaggacacatctgttctgggttcttgacctatctgtctccaattcatctccccttttcagccatttcaacaaactactctttggagctctgagatgacatcttgttgttttatatagatgtatcttttaaaaatagttcacgtttggagaattcttttgtactcatttgctttttgtctgagaaccatgtctatttttataactggagtgtgagttctgtatcttctcacattctgtatactgtatccattttctagagaacccagtagcttttatacagtctcttcttaccaccccttgtggtttcagaacaagctttattttattacgagtatattaatgacaactaattcctgttccaattctacctgttttagttgtgaaggtagttttgtgtaatccagttgattgctcctctggcagagagaaggagctcaaaagatacttgatgtctttcatgtaagtttacctggtcttttcctattgaagaatttttcatcagaaacgactgggaaagtttgggaaagtcagcaaaagaaagaatgcatttcgaaagcaaacagaagaaaaaagtatattctcacagtttttccccaggaagtctggagaaaaagtcctcatgtcaccaatttctctgttgcatgaattttagtgttttgctataagacagcatgagggctatcaggccaaaattcattattgtatttccaatacagtttgtcttgaatgtctgtctcttaaaaaaaaaaaaaaaaaaa

SEQ ID NO: 388 - DNA, 4250 bp, Homo sapiens
aatgcaaatcgggaaaagggggtgagctgggctggcttccgtcctggtagccaacgctaattctccctcgagttcttgggagatgggcatttggcgagaaggctggcgttagtgaagcgcgtccggcgtcacggaaagaagcacttgtaaggaaatatagcatccattgtgaaagtggaaaagtaaagataattcatcatgcctgctgtggcttcagttcctaaagaactctacctcagttcttcactaaaagaccttaataagaagacagaagttaaaccagagaaaataagcactaagagttatgtgcacagtgccctgaagatctttaagacagcagaagaatgcagattagatcgtgatgaggaaagggcctatgtactatatatgaaatacgtgactgtttataatcttatcaaaaaaagacctgatttcaagcaacagcaggattatttccattcaatacttggacctggaaacatcaaaaaagctgtcgaagaagctgaaagactctctgaaagccttaaattaagatatgaagaagctgaagtccggaaaaaacttgaggaaaaagacaggcaggaggaagcacagcggctacaacaaaaaaggcaggaaacaggaagagaggatggtggcacattggctaaaggctctttggagaatgttttggattccaaagacaaaacccaaaagagcaatggtgaaaagaatgaaaaatgtgagaccaaagagaaaggagcaatcacagcaaaggaactatacacaatgatgacggataaaaacatcagcttgattataatggatgctcgaagaatgcaggattatcaggattcctgtattttacattctctcagtgttcctgaagaagccatcagtccaggagtcactgctagttggattgaagcacacctgccagatgattctaaagacacatggaagaagagggggaatgtggagtatgtggtacttcttgactggtttagttctgccaaagatttacagattggaacaactctccggagtctgaaagatgcacttttcaagtgggaaagtaaaactgtcctgcgcaatgagcctttggttttagagggaggctatgaaaactggctcctttgttatccccagtatacaacaaatgctaaggtcactccacccccacgacgccagaatgaagaggtgtctatctcattggattttacttatccctcattggaagaatcaattccttctaaacctgctgcccagacgccacctgcatctatagaagtagatgaaaatatagaattgataagtggtcaaaatgagagaatgggaccactgaatatatcaactccagttgaaccagttgctgcttctaaatctgatgtttcacccataattcagccagtgcctagtataaagaatgttccacagattgatcgtactaaaaaaccagcagtcaaattgcctgaagagcatagaataaaatctgaaagtacaaaccatgagcaacaatctcctcagagtggaaaagttattcctgatcgttccaccaagccagtagttttttctccaactctcatgttaacagatgaagaaaaggctcgtattcatgcagaaactgctcttctaatggaaaaaaacaaacaagaaaaagaacttcgggaaaggcagcaagaggaacagaaagagaaactgaggaaggaagaacaagaacaaaaagccaaaaagaaacaagaagctgaagaaaatgaaattacagagaagcaacaaaaagcaaaagaagaaatggggaagaaagaaagtgaacaggccaagaaagaagataaagaaacctcagcaaagaggggcaaagaaataacaggagtaaaaagacaaagtaaaagtgaacatgaaacttctgatgccaagaaatctgtagaagatagggggaaaaggtgtccaaccccagaaatacagaaaaagtcaacaggagatgtgccccatacatctgtgacaggggattcaggttcaggcaagccatttaagattaaaggacaaccagaaagtggaattctaaggacaggaacttttagagaggatacagacgataccgaaagaaataaagctcaacgagaacctttgacaagagcacgaagtgaagaaatggggaggatcgtaccaggactgccttcaggctgggccaagtttcttgacccaatcactggaacctttcgttattatcattcacccaccaacactgttcatatgtacccaccggaaatggctccttcatctgcacctccttccacccctccaactcataaagccaagccacagattcctgctgagcgggatagggaaccttccaaactgaagcgctcccactcctccccagatataacccaggctattcaagaggaagagaagaggaagccaacagtaactccaacagttaatcgggaaaacaagccaacatgttatcctaaagctgagatctcaaggctttctgcttctcagattcggaacctcaatcctgtttttggaggttctggaccagctcttactggacttcgtaacttaggaaatacttgttatatgaactcaatattgcagtgcctatgtaacgctccacatttggctgattatttcaaccgaaactgttatcaggatgatattaacaggtcaaatttgttggggcataaaggtgaagtggcagaagaatttggtataatcatgaaagccctgtggacaggacagtatagatatatcagtccaaaggactttaaaatcaccattgggaagatcaatgaccagtttgcaggatacagtcagcaagattcacaagaattgcttctgttcctaatggatggtctccatgaagatctaaataaagctgataatcggaagagatataaagaagaaaataatgatcatctcgatgactttaaagctgcagaacatgcctggcagaaacacaagcagctcaatgagtctattattgttgcactttttcagggtcaattcaaatctacagtacagtgcctcacatgtcacaaaaagtctagggcatttgaggccttcatgtatttgtctctaccactagcatccacaagtaaatgtacattacaggattgccttagattattttccaaagaagaaaaactcacagataacaacagattttactgcagtcattgcagagctcgacgggattctctaaaaaagatagaaatctggaagttaccacctgtgcttttagtgcatctgaaacgtttttcctacgatggcaggtggaaacaaaaattacagacatctgtggacttcccgttagaaaatcttgacttgtcacagtatgttattggtccaaagaacaatttgaagaaatataatttgttttctgtttcaaatcactacggtgggctggatggaggccactacacagcctattgtaaaaatgcagcaagacaacggtggtttaagtttgatgatcatgaagtttctgatatctccgtttcttctgtgaaatcttcagcagcttatatcctcttttatacttcattgggaccacgagtaactgatgtagccacataaggagacataggttataaactagttatcttttaaaaggctcagcaacacaactcttgaaatgcttatcaggataatggtagctatagctggccatttagaggaattctaggacagtgggagctgtgttactagcactatataattccggtcagtgctgacaaataacatttaacaagtattgcagtaatcatcacttacaggtaccatttatttcaaaacaacttttttagtctgctccaaagttaaaataattaactagctaagcattattattcgactggtctaaaaactattgttatctttttttttccttttcactgttatggccttttcacatttctaaatcccatcttgatatactatgaatactctagaatgatgtaaagcagataggaatgtatgtgtacatatttattgcatacttgcacatcaaatcgacgtacatagtttaacacgtggtccttttgtgaaacctagaactcagaggattgctttttttctttcagcctattttgagtaacttcagtgctttcttagggaaatgacagggcaaagcaatttttctgttggctttgggctgtatttgtgcactaaatctttattctaaaaaaaaaaatggaaactttaatttttttaaaacgagaatttcatttacagctacattaaaatcttaatgagaaaaataaaaaaaaaaa

SEQ ID NO: 389 - DNA, 7718 bp, Homo sapiens
cgggagcggcgggagcggtggcggcggcagaggcggcggctccagcttcggctccggctcgggctcgggctccggctccggctccggctccggctccagctcgggtggcggtggcgggagcgggaccaggtggaggcggcggcggcagaggagtgggagcagcggccctagcggcttgcggggggacatgcggaccgacggcccctggataggcggaaggagtggaggccctggtgcccggcccttggtgctgagtatccagcaagagtgaccggggtgaagaagcaaagactcggttgattgtcctgggctgtggctggctgtggagctagagccctggatggcccctgagccagccccagggaggacgatggtgccccttgtgcctgcactggtgatgcttggtttggtggcaggcgcccatggtgacagcaaacctgtcttcattaaagtccctgaggaccagactgggctgtcaggaggggtagcctccttcgtgtgccaagctacaggagaacccaagccgcgcatcacatggatgaagaaggggaagaaagtcagctcccagcgcttcgaggtcattgagtttgatgatggggcagggtcagtgcttcggatccagccattgcgggtgcagcgagatgaagccatctatgagtgtacagctactaacagcctgggtgagatcaacactagtgccaagctctcagtgctcgaagaggaacagctgccccctgggttcccttccatcgacatggggcctcagctgaaggtggtggagaaggcacgcacagccaccatgctatgtgccgcaggcggaaatccagaccctgagatttcttggttcaaggacttccttcctgtagaccctgccacgagcaacggccgcatcaagcagctgcgttcaggtgccttgcagatagagagcagtgaggaatccgaccaaggcaagtacgagtgtgtggcgaccaactcggcaggcacacgttactcagcccctgcgaacctgtatgtgcgagtgcgccgcgtggctcctcgtttctccatccctcccagcagccaggaggtgatgccaggcggcagcgtgaacctgacatgcgtggcagtgggtgcacccatgccctacgtgaagtggatgatgggggccgaggagctcaccaaggaggatgagatgccagttggccgcaacgtcctggagctcagcaatgtcgtacgctctgccaactacacctgtgtggccatctcctcgctgggcatgatcgaggccacagcccaggtcacagtgaaagctcttccaaagcctccgattgatcttgtggtgacagagacaactgccaccagtgtcaccctcacctgggactctgggaactcggagcctgtaacctactatggcatccagtaccgcgcagcgggcacggagggcccctttcaggaggtggatggtgtggccaccacccgctacagcattggcggcctcagccctttctcggaatatgccttccgcgtgctggcggtgaacagcatcgggcgagggccgcccagcgaggcagtgcgggcacgcacgggagaacaggcgccctccagcccaccgcgccgcgtgcaggcacgcatgctgagcgccagcaccatgctggtgcagtgggagcctcccgaggagcccaacggcctggtgcggggataccgcgtctactatactccggactcccgccgccccccgaacgcctggcacaagcacaacaccgacgcggggctcctcacgaccgtgggcagcctgctgcctggcatcacctacagcctgcgcgtgcttgccttcaccgccgtgggcgatggccctcccagccccaccatccaggtcaagacgcagcagggagtgcctgcccagcccgcggacttccaggccgaggtggagtcggacaccaggatccagctctcgtggctgctgccccctcaggagcggatcatcatgtatgaactggtgtactgggcggcagaggacgaagaccaacagcacaaggtcaccttcgacccaacctcctcctacacactagaggacctgaagcctgacacactctaccgcttccagctggctgcacgctcggatatgggggtgggcgtcttcacccccaccattgaggcccgcacagcccagtccaccccctccgcccctccccagaaggtgatgtgtgtgagcatgggctccaccacggtccgggtaagttgggtcccgccgcctgccgacagccgcaacggcgttatcacccagtactccgtggcccacgaggcggtggacggcgaggaccgcgggcggcatgtggtggatggcatcagccgtgagcactccagctgggacctggtgggcctggagaagtggacggagtaccgggtgtgggtgcgggcacacacagacgtgggccccggccccgagagcagcccggtgctggtgcgcaccgatgaggacgtgcccagcgggcctccgcggaaggtggaggtggagccactgaactccactgctgtgcatgtctactggaagctgcctgtccccagcaagcagcatggccagatccgcggctaccaggtcacctacgtgcggctggagaatggcgagccccgtggactccccatcatccaagacgtcatgctagccgaggcccagtggcggccagaggagtccgaggactatgaaaccactatcagcggcctgaccccggagaccacctactccgttactgttgctgcctataccaccaagggggatggtgcccgcagcaagcccaaaattgtcactacaacaggtgcagtcccaggccggcccaccatgatgatcagcaccacggccatgaacactgcgctgctccagtggcacccacccaaggaactgcctggcgagctgctgggctaccggctgcagtactgccgggccgacgaggcgcggcccaacaccatagatttcggcaaggatgaccagcacttcacagtcaccggcctgcacaaggggaccacctacatcttccggcttgctgccaagaaccgggctggcttgggtgaggagttcgagaaggagatcaggacccccgaggacctgcccagcggcttcccccaaaacctgcatgtgacaggactgaccacgtctaccacagaactggcctgggacccgccagtgctggcggagaggaacgggcgcatcatcagctacaccgtggtgttccgagacatcaacagccaacaggagctgcagaacatcacgacagacacccgctttacccttactggcctcaagccagacaccacttacgacatcaaggtccgcgcatggaccagcaaaggctctggcccactcagccccagcatccagtcccggaccatgccggtggagcaagtgtttgccaagaacttccgggtggcggctgcaatgaagacgtctgtgctgctcagctgggaggttcccgactcctataagtcagctgtgccctttaagattctgtacaatgggcagagtgtggaggtggacgggcactcgatgcggaagctgatcgcagacctgcagcccaacacagagtactcgtttgtgctgatgaaccgtggcagcagcgcagggggcctgcagcacctggtgtccatccgcacagcccccgacctcctgcctcacaagccgctgcctgcctctgcctacatagaggacggccgcttcgatctctccatgccccatgtgcaagacccctcgcttgtcaggtggttctacattgttgtggtacccattgaccgtgtgggcgggagcatgctgacgccaaggtggagcacacccgaggaactggagctggacgagcttctagaagccatcgagcaaggcggagaggagcagcggcggcggcggcggcaggcagaacgtctgaagccatatgtggctgctcaactggatgtgctcccggagacctttaccttgggggacaagaagaactaccggggcttctacaaccggcccctgtctccggacttgagctaccagtgctttgtgcttgcctccttgaaggaacccatggaccagaagcgctatgcctccagcccctactcggatgagatcgtggtccaggtgacaccagcccagcagcaggaggagccggagatgctgtgggtgacgggtcccgtgctggcagtcatcctcatcatcctcattgtcatcgccatcctcttgttcaaaaggaaaaggacccactctccgtcctctaaggatgagcagtcgatcggactgaaggactccttgctggcccactcctctgaccctgtggagatgcggaggctcaactaccagaccccaggtatgcgagaccacccacccatccccatcaccgacctggcggacaacatcgagcgcctcaaagccaacgatggcctcaagttctcccaggagtatgagtccatcgaccctggacagcagttcacgtgggagaattcaaacctggaggtgaacaagcccaagaaccgctatgcgaatgtcatcgcctacgaccactctcgagtcatccttacctctatcgatggcgtccccgggagtgactacatcaatgccaactacatcgatggctaccgcaagcagaatgcctacatcgccacgcagggccccctgcccgagaccatgggcgatttctggagaatggtgtgggaacagcgcacggccactgtggtcatgatgacacggctggaggagaagtcccgggtaaaatgtgatcagtactggccagcccgtggcaccgagacctgtggccttattcaggtgaccctgttggacacagtggagctggccacatacactgtgcgcaccttcgcactccacaagagtggctccagtgagaagcgtgagctgcgtcagtttcagttcatggcctggccagaccatggagttcctgagtacccaactcccatcctggccttcctacgacgggtcaaggcctgcaaccccctagacgcagggcccatggtggtgcactgcagcgcgggcgtgggccgcaccggctgcttcatcgtgattgatgccatgttggagcggatgaagcacgagaagacggtggacatctatggccacgtgacctgcatgcgatcacagaggaactacatggtgcagacggaggaccagtacgtgttcatccatgaggcgctgctggaggctgccacgtgcggccacacagaggtgcctgcccgcaacctgtatgcccacatccagaagctgggccaagtgcctccaggggagagtgtgaccgccatggagctcgagttcaagttgctggccagctccaaggcccacacgtcccgcttcatcagcgccaacctgccctgcaacaagttcaagaaccggctggtgaacatcatgccctacgaattgacccgtgtgtgtctgcagcccatccgtggtgtggagggctctgactacatcaatgccagcttcctggatggttatagacagcagaaggcctacatagctacacaggggcctctggcagagagcaccgaggacttctggcgcatgctatgggagcacaattccaccatcatcgtcatgctgaccaagcttcgggagatgggcagggagaaatgccaccagtactggccagcagagcgctctgctcgctaccagtactttgttgttgacccgatggctgagtacaacatgccccagtatatcctgcgtgagttcaaggtcacggatgcccgggatgggcagtcaaggacaatccggcagttccagttcacagactggccagagcagggcgtgcccaagacaggcgagggattcattgacttcatcgggcaggtgcataagaccaaggagcagtttggacaggatgggcctatcacggtgcactgcagtgctggcgtgggccgcaccggggtgttcatcactctgagcatcgtcctggagcgcatgcgctatgagggcgtggtcgacatgtttcagaccgtgaagaccctgcgtacacagcgtcctgccatggtgcagacagaggaccagtatcagctgtgctaccgtgcggccctggagtacctcggcagctttgaccactatgcaacgtaactaccgctcccctctcctccgccacccccgccgtggggctccggaggggacccagctcctctgagccataccgaccatcgtccagccctcctacgcagatgctgtcactggcagagcacagcccacggggatcacagcgtttcaggaacgttgccacaccaatcagagagcctagaacatccctgggcaagtggatggcccagcaggcaggcactgtggcccttctgtccaccagacccacctggagcccgcttcaagctctctgttgcgctcccgcatttctcatgcttcttctcatggggtggggttggggcaaagcctcctttttaatacattaagtggggtagactgagggattttagcctcttccctctgatttttcctttcgcgaatccgtatctgcagaatgggccactgtaggggttggggtttattttgttttgttttttttttttttttgtatgacttctgctgaaggacagaacattgccttcctcgtgcagagctggggctgccagcctgagcggaggctcggccgtgggccgggaggcagtgctgatccggctgctcctccagcccttcagacgagatcctgtttcagctaaatgcagggaaactcaatgtttttttaagttttgttttccctttaaagcctttttttaggccacattgacagtggtgggcggggagaagatagggaacactcatccctggtcgtctatcccagtgtgtgtttaacattcacagcccagaaccacagatgtgtctgggagagcctggcaaggcattcctcatcaccatcgtgtttgcaaaggttaaaacaaaaacaaaaaaccacaaaaataaaaaacaaaaaaaacaaaaaacccaaaaaaaaaaaaaaaaagagtcagcccttggcttctgcttcaaaccctcaagaggggaagcaactccgtgtgcctggggttcccgagggagctgctggctgacctgggcccacagagcctggctttggtccccagcattgcagtatggtgtggtgtttgtaggctgtggggtctggctgtgtggccaaggtgaatagcacaggttagggtgtgtgccacaccccatgcacctcagggccaagcgggggcgtggctggcctttcaggtccaggccagtgggcctggtagcacatgtctgtcctcagagcaggggccagatgattttcctccctggtttgcagctgttttcaaagcccccgataatcgctcttttccactccaagatgccctcataaaccaatgtggcaagactactggacttctatcaatggtactctaatcagtccttattatcccagcttgctgaggggcagggagagcgcctcttcctctgggcagcgctatctagataggtaagtgggggcggggaagggtgcatagctgttttagctgagggacgtggtgccgacgtccccaaacctagctaggctaagtcaagatcaacattccagggttggtaatgttggatgatgaaacattcatttttaccttgtggatgctagtgctgtagagttcactgttgtacacagtctgttttctatttgttaagaaaaactacagcatcattgcataattcttgatggtaataaatttgaataatcagatttcttacaaaaaaaaaaaaa

SEQ ID NO: 390 - DNA, 5631 bp, Homo sapiens
gcggccgcggcgcggagccgagcgggcgtccgtcgccggagctgcaatgagcggcgcccggaggctgtgacctgcgcgcggcggcccgaccggggcccctgaatggcggctcgctgaggcggcggcggcggcggcggcggctcaggctcctcggggcgtggcgtggcggtgaaggggtgatgctgttcaagctcctgcagagacagacctatacctgcctgtcccacaggtatgggctctacgtgtgcttcttgggcgtcgttgtcaccatcgtctccgccttccagttcggagaggtggttctggaatggagccgagatcaataccatgttttgtttgattcctatagagacaatattgctggaaagtcctttcagaatcggctttgtctgcccatgccgattgacgttgtttacacctgggtgaatggcacagatcttgaactactgaaggaactacagcaggtcagagaacagatggaggaggagcagaaagcaatgagagaaatccttgggaaaaacacaacggaacctactaagaagagtgagaagcagttagagtgtttgctaacacactgcattaaggtgccaatgcttgtcctggacccagccctgccagccaacatcaccctgaaggacctgccatctctttatccttcttttcattctgccagtgacattttcaatgttgcaaaaccaaaaaacccttctaccaatgtctcagttgttgtttttgacagtactaaggatgttgaagatgcccactctggactgcttaaaggaaatagcagacagacagtatggaggggctacttgacaacagataaagaagtccctggattagtgctaatgcaagatttggctttcctgagtggatttccaccaacattcaaggaaacaaatcaactaaaaacaaaattgccagaaaatctttcctctaaagtcaaactgttgcagttgtattcagaggccagtgtagcgcttctaaaactgaataaccccaaggattttcaagaattgaataagcaaactaagaagaacatgaccattgatggaaaagaactgaccataagtcctgcatatttattatgggatctgagcgccatcagccagtctaagcaggatgaagacatctctgccagtcgttttgaagataacgaagaactgaggtactcattgcgatctatcgagaggcatgcaccatgggttcggaatattttcattgtcaccaacgggcagattccatcctggctgaaccttgacaatcctcgagtgacaatagtaacacaccaggatgtttttcgaaatttgagccacttgcctacctttagttcacctgctattgaaagtcacattcatcgcatcgaagggctgtcccagaagtttatttacctaaatgatgatgtcatgtttgggaaggatgtctggccagatgatttttacagtcactccaaaggccagaaggtttatttgacatggcctgtgccaaactgtgccgagggctgcccaggttcctggattaaggatggctattgtgacaaggcttgtaataattcagcctgcgattgggatggtggggattgctctggaaacagtggagggagtcgctatattgcaggaggtggaggtactgggagtattggagttggacagccctggcagtttggtggaggaataaacagtgtctcttactgtaatcagggatgtgcgaattcctggctcgctgataagttctgtgaccaagcatgcaatgtcttgtcctgtgggtttgatgctggcgactgtgggcaagatcattttcatgaattgtataaagtgatccttctcccaaaccagactcactatattattccaaaaggtgaatgcctgccttatttcagctttgcagaagtagccaaaagaggagttgaaggtgcctatagtgacaatccaataattcgacatgcttctattgccaacaagtggaaaaccatccacctcataatgcacagtggaatgaatgccaccacaatacattttaatctcacgtttcaaaatacaaacgatgaagagttcaaaatgcagataacagtggaggtggacacaagggagggaccaaaactgaattctacagcccagaagggttacgaaaatttagttagtcccataacacttcttccagaggcggaaatcctttttgaggatattcccaaagaaaaacgcttcccgaagtttaagagacatgatgttaactcaacaaggagagcccaggaagaggtgaaaattcccctggtaaatatttcactccttccaaaagacgcccagttgagtctcaataccttggatttgcaactggaacatggagacatcactttgaaaggatacaatttgtccaagtcagccttgctgagatcatttctgatgaactcacagcatgctaaaataaaaaatcaagctataataacagatgaaacaaatgacagtttggtggctccacaggaaaaacaggttcataaaagcatcttgccaaacagcttaggagtgtctgaaagattgcagaggttgacttttcctgcagtgagtgtaaaagtgaatggtcatgaccagggtcagaatccacccctggacttggagaccacagcaagatttagagtggaaactcacacccaaaaaaccataggcggaaatgtgacaaaagaaaagcccccatctctgattgttccactggaaagccagatgacaaaagaaaagaaaatcacagggaaagaaaaagagaacagtagaatggaggaaaatgctgaaaatcacataggcgttactgaagtgttacttggaagaaagctgcagcattacacagatagttacttgggctttttgccatgggagaaaaaaaagtatttccaagatcttctcgacgaagaagagtcattgaagacacaattggcatacttcactgatagcaaaaatactgggaggcaactaaaagatacatttgcagattccctcagatatgtaaataaaattctaaatagcaagtttggattcacatcgcggaaagtccctgctcacatgcctcacatgattgaccggattgttatgcaagaactgcaagatatgttccctgaagaatttgacaagacgtcatttcacaaagtgcgccattctgaggatatgcagtttgccttctcttatttttattatctcatgagtgcagtgcagccactgaatatatctcaagtctttgatgaagttgatacagatcaatctggtgtcttgtctgacagagaaatccgaacactggctaccagaattcacgaactgccgttaagtttgcaggatttgacaggtctggaacacatgctaataaattgctcaaaaatgcttcctgctgatatcacgcagctaaataatattccaccaactcaggaatcctactatgatcccaacctgccaccggtcactaaaagtctagtaacaaactgtaaaccagtaactgacaaaatccacaaagcatataaggacaaaaacaaatataggtttgaaatcatgggagaagaagaaatcgcttttaaaatgattcgtaccaacgtttctcatgtggttggccagttggatgacataagaaaaaaccctaggaagtttgtttgcctgaatgacaacattgaccacaatcataaagatgctcagacagtgaaggctgttctcagggacttctatgaatccatgttccccataccttcccaatttgaactgccaagagagtatcgaaaccgtttccttcatatgcatgagctgcaggaatggagggcttatcgagacaaattgaagttttggacccattgtgtactagcaacattgattatgtttactatattctcattttttgctgagcagttaattgcacttaagcggaagatatttcccagaaggaggatacacaaagaagctagtcccaatcgaatcagagtatagaagatcttcatttgaaaaccatctacctcagcatttactgagcattttaaaactcagcttcacagagatgtctttgtgatgtgatgcttagcagtttggcccgaagaaggaaaatatccagtaccatgctgttttgtggcatgaatatagcccactgaccaggaattatttaaccaacccactgaaaacttgtgtgttgagcagctctgaactgattttacttttaaagaatttgctcatggacctgtcatcctttttataaaaaggctcactgacaagagacagctgttaatttcccacagcaatcattgcagactaactttattaggagaagcctatgccagctgggagtgattgctaagaggctccagtctttgcattccaaagccttttgctaaagttttgcactttttttttttcatttcccatttttaagtagttactaagttaactagttattcttgcttctgagtataacgaattgggatgtctaaacctatttttatagatgttatttaaataatgcagcaatatcacctcttattgacaatacctaaattatgagttttattaatatttaagactgtaaatggtcttaaaccactaactactgaagagctcaatgattgacatctgaaatgctttgtaattattgacttcagcccctaagaatgctatgatttcacgtgcaggtctaatttcaaagggctagagttagtactacttaccagatgtaattatgttttggaaatgtacatattcaaacagaagtgcctcattttagaaatgagtagtgctgatggcactggcacattacagtggtgtcttgtttaatactcattggtatattccagtagctatctctctcagttggtttttgatagaacagaggccagcaaactttctttgtaaaaggctggttagtaaattattgcaggccacctgtgtctttgtcatacattcttcttgctgttgtttagtttgttttttttcaaacaaccctctaaaaatgtaaaaaccatgtttagcttgcagctgtacaaaaactgcccaccagccagatgtgaccctcaggccatcatttgccaatcactgagaattagtttttgttgttgttgttgttgttgtttttgagacagagtctctctctgttgcccaggctggagtgcagtggcgcaatctcagctcactgcaacctccgcctcccgggttcaagcagttctgtctcagccttctgagtagctgggactacaggtgcatgccaccacaccctgctaatttttgtatttttagtagagacgggggttccaccatattggtcaggcttatcttgaactcctgacctcaggtgatccacctgcctctgcctcccaaagtgctgagattacaggcataagccagtgcacccagccgagaattagtatttttatgtatggttaaaccttggcgtctagccatattttatgtcataatacaatggatttgtgaagagcagattccatgagtaactctgacaggtattttagatcatgatctcaacaatattcttccaaaatggcatacatcttttgtacaaagaacttgaaatgtaaatactgtgtttgtgctgtaagagttgtgtatttcaaaaactgaaatctcataaaaagttaaatttttgtctgaaaaaaaaaaaaaaaaa

SEQ ID NO: 391 - DNA, 2784 bp, Homo sapiens
gagggtgcgcccaccggtcccgccgggcgcccgcgggacgcgccgccagggccctctccgccgggggctcggcgctcgcccacctcttccaaatttaaccattacctaaatccgaagggaaatgagcaaacctctcggattgggtgtcaaggtctcctccgggctggggctgagcaagccctcggagtgaccgtgggtgacagcggctccagggactcttggggcgcagtggggaaagtgccggaccaccatgccgcgctcatttctcgtcaaaagcaagaaggctcacagctaccaccagccgcgctccccaggaccagactattccctccgtttagagaatgtaccggcgcctagccgagcagacagcacttcaaatgcaggcggggcgaaggcggagccccgggaccgtttgtcccccgaatcgcagctgaccgaagccccagacagagcctccgcatccccagacagctgcgaaggcagcgtctgcgaacggagctcggagtttgaggacttctggaggcccccgtcaccctccgcgtctccagcctcggagaagtcaatgtgcccatcgctggacgaagcccagcccttccccctgcctttcaaaccgtactcatggagcggcctggcgggttctgacctgcggcacctggtgcagagctaccgaccgtgtggggccctggagcgtggcgctggcctgggcctcttctgcgaacccgccccggagcctggccacccggccgcgctgtacggcccgaagcgggctgccggcggcgcgggggccggggcgccagggagctgcagcgcaggggccggtgccaccgctggccctggcctagggctctacggcgacttcgggtctgcggcagccgggctgtatgagaggcccacggcagcggcgggcttgctgtaccccgagcgtggccacgggctgcacgcagacaagggcgctggcgtcaaggtggagtcggagctgctgtgcacccgcctgctgctgggcggcggctcctacaagtgcatcaagtgcagcaaggtgttctccacgccgcacgggctcgaggtgcacgtgcgcaggtcccacagcggtaccagaccctttgcctgcgagatgtgcggcaagaccttcgggcacgcggtgagcctggagcagcacaaagccgtgcactcgcaggaacggagctttgactgtaagatctgtgggaagagcttcaagaggtcatccacactgtccacacacctgcttatccactcagacactcggccctacccctgtcagtactgtggcaagaggttccaccagaagtcagacatgaagaaacacactttcatccacactggtgagaagcctcacaagtgccaggtgtgcggcaaggcattcagccagagctccaacctcatcacccacagccgcaaacacacaggcttcaagcccttcggctgcgacctctgtgggaagggtttccagaggaaggtggacctccgaaggcaccgggagacgcagcatgggctcaaatgagcaccctggctggctgcaagcagcagctacacaacactacagagggcagcctccctgcttgccaccactctgctccctgcttgcctccactcccttctgactttccagaccccaggtccagtctgcagatcctaccaggttgctcctccttcgccttacctcctggagctgccagaagaaatgaggtaccttttcaaagtgcagccgagagtgagaaccaagtgactctctaggcttcggacacaaataggctcctctacacctgaagacaaaggcaaagtcaaatggggaccagaataaatcttagaccccacagtccttcccatttccagccctaatctacagacaggaatgcccttcaggtttcttccctcccccctcttgacctaccccagatatttgtgtggaagaggaggaatcaccatttacaaggtggacaaatgctaatatttttatctagaaagaagagtgagtgttaacttttatttttttccttctggggggtctgttgactcctttcttttgggtgctgcctataaatcttggaggaatcatttctcctcctcaaaaactgattcagaaactgacttggggaaggaatttaatactttgaagtcatgagatgcaccatcgaggctacccccaagaagaagcagaagagaagttggtaatgagaggggattagaggtcctcccttcagtagggctgtgaaaacctcatcactggaggtaaaagcacaagcaatgcctgtggacaagatgtcattcattcactcagcaaatgttcatggatcaccggctaccaaggtaccaggcaccatgctaggtattggggaagagagactgaagtcacaacccctgactgctcctcaaaagctaacggttgcacctccaagtggctgggtctgttcttactcttggagggaattctgagaagacagcacagaattgtaaaccttcccttttgacccttttggattttatcaggtgtaaacaaaaagctgaacagttacttcaaagatatgtgtgtatattcagttttttattgttaagctgatattttaaagatttctgagctagcaggcatgtgggaaggaaggctctgtcttcaactctttgaccctccatgtgtaccatagaggggggaaaggtggtattttcactttgatgaggttggtaaatgtttttagatcttctggtaagcattatgtttgttaatacatatttattagagtgatgttttaagttaataaagtattaagagta

SEQ ID NO: 392 - DNA, 753 bp, Homo sapiens
gcgcttcgtcacaagggtgcgaggaaagtcagtgagcaaatcgcggaccaccggggctgccagctcgcctgactcccggcctcttgcgctcctaggggcggagaagggtgcgggctcttcgccctttgtgtcctccttctttcactaacttctggactttccagctcttccgaagttcgttcttgcgcaaagcccaaaggctggaaaaccgtccacgatgaccagcatgactcagtctctgcgggaggtgataaaggccatgaccaaggctcgcaattttgagagagttttgggaaagattactcttgtctctgctgctcctgggaaagtgatttgtgaaatgaaagtagaagaagagcataccaatgcaataggcactctccacggcggtttgacagccacgttagtagataacatatcaacaatggctctgctatgcacggaaaggggagcacccggagtcagtgtcgatatgaacataacgtacatgtcacctgcaaaattaggagaagatatagtgattacagcacatgttctgaagcaaggaaaaacacttgcatttacctctgtggatctgaccaacaaggccacaggaaaattaatagcacaaggaagacacacaaaacacctgggaaactgagagaacagcagaatgacctaaagaaacccaacaatgaatatcaagtatagatttgactcaaacaattgtaatttttgaaataaactagcaaaaccagaaaaaaaaaaaaaaaa

SEQ ID NO: 393 - DNA, 3982 bp, Homo sapiens
gccgcttctcttccccttccgtgggtcagggccggtccggtccggaacctgcagcccctttcccagtgttctagttcgcccgtgacccggaataatgagcaaggagggtgtggtgggttgaaagccatcctactttactcccgagttagagcatggattcagttttagtcttaagggggaagtgagattggagatttttatttttaattttgggcagaagcaggttgactctagggatctccagagcgagaggatttaacttcatgttgctcccgtgtttgaaggaggacaataaaagtcccaccgggcaaaattttcgtaacctctgcggtagaaaacgtcaggtatcttttaaatcgcgatagttttcgctgtgtcaggctttcttcggtggagctccgagggtagctaggttctaggtttgaaacagatgcagaatccaaaggcagcgcaaaaaacagccaccgattttgctatgtctctgagctgcgagataatcagacagctaaatggagtctgagcagctgttccatagaggctactatagaaacagctacaacagtataacaagtgcaagtagtgatgaggaacttttagatggagcaggtgttattatggactttcaaacatctgaagatgacaatttattagatggtgacactgcagttggaactcattatacaatgacaaatggaggcagcattaacagttctacacatttactggatcttttggatgaaccaattccaggtgttggtacatatgatgatttccatactattgattgggtgcgagaaaaatgtaaagacagagaaaggcatagacggatcaacagcaaaaagaaagaatcagcatgggaaatgacaaaaagtttgtatgatgcgtggtcaggatggctagtagtaacactaacaggattggcatcaggggcactggccggattaatagacattgctgccgattggatgactgacctaaaggagggcatttgccttagtgcgttgtggtacaaccacgaacagtgctgttggggatctaatgaaacaacatttgaagagagggataaatgtccacagtggaaaacatgggcagaattaatcataggtcaagcagagggtcctggttcttatatcatgaactacataatgtacatcttctgggccttgagttttgcctttcttgcagtttccctggtaaaggtatttgctccatatgcctgtggctctggaattccagagattaaaactattttaagtggattcatcatcagaggttacttgggaaaatggactttaatgattaaaaccatcacattagtcctggctgtggcatcaggtttgagtttaggaaaagaaggtcccctggtacatgttgcctgttgctgcggaaatatcttttcctacctctttccaaagtatagcacaaacgaagctaaaaaaagggaggtgctatcagctgcctcagctgcaggggtttctgtagcttttggtgcaccaattggaggagttctttttagcctggaagaggttagctattattttcctctcaaaactttatggagatcattttttgctgctttagtggctgcatttgttttgaggtccatcaatccatttggtaacagccgtctggtccttttttatgtggagtatcatacaccatggtacctttttgaactgtttccttttattcttctaggggtatttggagggctttggggagcctttttcattagggcaaatattgcctggtgtcgtcgacgcaagtccacgaaatttggaaagtatcccgttctggaagtcattattgttgcagccattactgctgtgatagccttccctaatccatacactaggctaaacaccagtgaactgatcaaagagctttttacagactgtggtcccctggaatcctcttctctttgtgactacagaaatgacatgaatgccagtaaaattgtcgatgacattcctgatcgtccagcaggcattggagtatattcagctatatggcagttatgcctggcactcatatttaaaatcataatgacagtattcacttttggcatcaaggttccatcaggcttgttcatccccagcatggccattggagcgatcgcaggaaggattgtggggattgcggtggagcagcttgcctactatcaccacgactggtttatctttaaggagtggtgtgaggtcggggctgattgcattacacctggcctttatgccatggttggtgctgctgcatgcttaggtggtgtgacaagaatgactgtctccctggtggttattgtttttgagcttactggaggcttggaatatattgttccccttatggctgcagtcatgaccagtaaatgggttggagatgcctttggcagggaaggcatttatgaagcacacatccgattaaatggataccctttcttggatgcaaaagaagaattcactcataccaccctggctgctgacgttatgagacctcgaaggaatgatcctcccttagctgtcctgacacaggacaatatgacagtggatgatatagaaaacatgattaatgaaaccagctacaatggatttcctgtcataatgtcaaaagaatctcagagattagtgggatttgccctcagaagagacctgacaattgcaatagaaagtgccaggaaaaaacaagaaggtatcgttggcagttctcgggtgtgttttgcacagcacaccccatctcttccagcagaaagtcctcggccattgaagcttcgaagcattcttgacatgagcccttttacagtgacagaccacaccccaatggagatcgtggtggatattttccgaaagctgggactgaggcagtgccttgtaactcacaatgggcgcctccttggcattataacaaaaaaagatatcctccggcatatggcccagacggcaaaccaagaccccgcttcaataatgttcaactgaatctcacagatgaggagagagaagaaacggaagaggaagtttatttgttgaatagcacaactctttaacctgagggagtcatctacttttttttcctcctttacaaaaaaagaaaggaaatataaaagccgggtttttgcaacatggtttgcaaataatgctggtggaatggaggagttgtttggggagggaaaggagagagaaggaaaggagtgaggtatttcccgtctaacagaaagcagcgtatcaactcctattgttctgcactggatgcattcagctgaggatgtgcctgatagtgcaggcttgcgcctcaacagagatgacagcagagtcctcgagcacctggcctgttgctccaacattgcaaagacacattatcagtccctatttctagagggattactttgaattgagccatctataaaactgcaaggtcttgcccttttttttaatcaaaactgttctgtttaattcatgaattgtatagttaagcattacctttctacattccagaagagcctttatttctctctctctctctctctctctctctctctctactgagctgtaacaaagcctctttaaatcggtgtatccttttgaagcagtcctttctcatattgagatgtactgtgattttactgaggtttcatcacaagaagggagtgtttcttgtgccattaaccatgtagtttgtaccatcactaaatgcttggaacagtacacatgcaccacaacaaaggctcatcaaacaggtaaagtctcgaaggaagcgagaacgaaatctctcattgtgtgccgtgtggctcaaaaccgaaaacaatgaagcttggttttaaaggataaagttttcttttttgttttcctctcagactttatggataatgtgaccgggtcttatgcaaattttctatttctaaaactactactatgatatacaagtgctgttgagcataattaaataaaatgctgctgctttgacagtaaagagaaggaagtattctgaaaaaaaa

SEQ ID NO: 394 - DNA, 2040 bp, Homo sapiens; identical to SEQ ID NO: 290

SEQ ID NO: 395 - DNA, 1294 bp, Homo sapiens
gagctccagcctccaggcacccgggatccagcgccgccgctcataacacccgcgaccccgcagctaagcgcagctcccgacgcaatggacccggcgctggcagcccagatgagcgaggctgtggccgagaagatgctccagtaccggcgggacacagcaggctggaagatttgccgggaaggcgtaccgaggagaaggcattgtatatgggacactagaggaggtgtgggactgtgtgaagccagctgttggaggcctacgagtgaagtgggatgagaatgtgaccggttttgaaattatccaaagcatcactgacaccctgtgtgtaagcagaacctccactccctccgctgccatgaagctcatttctcccagagattttgtggacttggtgctagtcaagagatatgaggatgggaccatcagttccaacgccacccatgtggagcatccgttatgtcccccgaagccaggttttgtgagaggatttaaccatccttgtggttgcttctgtgaacctcttccaggggaacccaccaagaccaacctggtcacattcttccataccgacctcagcggttacctcccacagaacgtggtggactccttcttcccccgcagcatgacccggttttatgccaaccttcagaaagcagtgaagcaattccatgagtaatgctatcgttacttcttggcaaagaactcccgtgactcatcgaggagctccagctgttgggacaccaaggagcctgggagcacgcagaggcctgtgttcactctttggaacaagctgatggactgcgcatctctgagaatgccaaccagaggcggcagcccacccttcctgcctcctgccccactcagggttggcgtgtgatgagccattcatgtgttccaaactccatctgcctgttacccaaacacgcctctcctggcagggtagacccaggcctctaaccatctgacagagactcggcctggacaccatgcgatgcactctggcaccaaggctttatgtgcccatcactctcagagaccacgtttccctgactgtcatagagaatcatcatcgccactgaaaaccaggccctgttgccttttaagcatgtaccgctccctcagtcctgtgctgcagccccccaaatatatttttctgatatagaccttgtatatggctttaatgccgcaaaatatttatttttccttaaaaaaggtgtcaacttggaaataatggtttaaaaacaggataagcattaaggaaaaacaaaaaaaaaaaaaaaaaaaaaaaaaaaaa

SEQ ID NO: 396 - DNA, 2262 bp, Homo sapiens; identical to SEQ ID NO: 297

SEQ ID NO: 397 - DNA, 7932 bp, Homo sapiens
ggctgctcctgcactgcgccggccctgagcggacctgtggctcggactatctattacatcgcagccgagctggtccggctggtggggtctgtggactccatgaagcccgtgctccagtccctctaccaccgagtgctgctctaccccccaccccagcaccgggtggaagccatcaaaataatgaaagagatacttgggagcccacagcgtctctgtgacttggcaggacccagctccactgaatcagagtccagaaaaagatcaatttcaaaaagaaagtctcatctggatctcctcaaactcatcatggatggcatgaccgaagcatgcatcaagggtggcatcgaagcttgctatgcagccgtgtcctgtgtctgcaccttgctgggtgccctggatgagctcagccaggggaagggcttgagcgaaggtcaggtgcaactgctgcttctgcgccttgaggagctgaaggatggggctgagtggagccgagattccatggagatcaatgaggctgacttccgctggcagcggcgagtgctgtcctcagaacacacgccgtgggagtcagggaacgagaggagccttgacatcagcatcagtgtcaccacagacacaggccagaccactctcgagggagagttgggtcagactacacccgaggaccattcgggaaaccacaagaacagtctcaagtcgccagccatcccagagggtaaggagacgctgagcaaagtattggaaacagaggcggtagaccagccagatgtcgtgcagagaagccacacggtcccttaccctgacataactaacttcctgtcagtagactgcaggacaaggtcctatggatctaggtatagtgagagcaattttagcgttgatgaccaagacctttctaggacagagtttgattcctgtgatcagtactctatggcagcagaaaaggactcgggcaggtccgacgtgtcagacattgggtcggacaactgttcactagccgatgaagagcagacaccccgggactgcctaggccaccggtccctgcgaactgccgccctgtctctaaaactgctgaagaaccaggaggcggatcagcacagcgccaggctgttcatacagtccctggaaggcctcctccctcggctcctgtctctctccaatgtagaggaggtggacaccgctctgcagaactttgcctctactttctgctcaggcatgatgcactctcctggctttgacgggaatagcagcctcagcttccagatgctgatgaacgcagacagcctctacacagctgcacactgcgccctgctcctcaacctgaagctctcccacggtgactactacaggaagcggccgaccctggcgccaggcgtgatgaaggacttcatgaagcaggtgcagaccagcggcgtgctgatggtcttctctcaggcctggattgaggagctctaccatcaggtgctcgacaggaacatgcttggagaggctggctattggggcagcccagaagataacagccttcccctcatcacaatgctgaccgatattgacggcttagagagcagtgccattggtggccagctgatggcctcggctgctacagagtctcctttcgcccagagcaggagaattgatgactccacagtggcaggcgtggcatttgctcgctatattctggtgggctgctggaagaacttgatcgatactttatcaaccccactgactggtcgaatggcggggagctccaaagggctggccttcattctgggagctgaaggcatcaaagagcagaaccagaaggagcgggacgccatctgcatgagcctcgacgggctgcggaaagccgcacggctgagctgcgctctaggcgttgctgctaactgcgcctcagcccttgcccagatggcagctgcctcctgtgtccaagaagaaaaagaagagagggaggcccaagaacccagtgatgccatcacacaagtgaaactaaaagtggagcagaaactggagcagattgggaaggtgcagggggtgtggctgcacactgcccacgtcttgtgcatggaggccatcctcagcgtaggcctggagatgggaagccacaacccggactgctggccacacgtgttcagggtgtgtgaatacgtgggcaccctggagcacaaccacttcagcgatggtgcctcgcagccccctctgaccatcagccagccccagaaggccactggaagcgctggcctccttggggaccccgagtgtgagggctcgccccccgagcacagcccggagcaggggcgctccctgagcacggcccctgtcgtccagcccctgtccatccaggacctcgtccgggaaggcagccggggtcgggcctccgacttccgcggcgggagcctcatgagcgggagcagcgcggccaaggtggtgctcaccctctccacgcaagccgacaggctctttgaagatgctacggataagttgaacctcatggccttgggaggttttctttaccagctgaagaaagcatcgcagtctcagcttttccattctgttacagatacagttgattactctctggcaatgccaggagaagttaaatccactcaagaccgaaaaagcgccctccacctgttccgcctggggaatgccatgctgaggattgtgcggagcaaagcacggcccctgctccacgtgatgcgctgctggagccttgtggccccacacctggtggaggctgcttgccataaggaaagacatgtgtctcagaaggctgtttccttcatccatgacatactgacagaagtcctcactgactggaatgagccacctcattttcacttcaatgaagcactcttccgacctttcgagcgcattatgcagctggaattgtgtgatgaggacgtccaagaccaggttgtcacatccattggtgagctggttgaagtgtgttccacgcagatccagtcgggatggagacccttgttcagtgccctggaaacagtgcatggcgggaacaagtcagagatgaaggagtacctggttggtgactactccatgggaaaaggccaagctccagtgtttgatgtatttgaagcttttctcaatactgacaacatccaggtctttgctaatgcagccactagctacatcatgtgccttatgaagtttgtcaaaggactgggggaggtggactgtaaagagattggagactgtgccccagcacccggagccccgtccacagacctgtgcctcccggccctggattacctcaggcgctgctctcagttattggccaaaatctacaaaatgcccttgaagccaatattccttagtgggagacttgccggcttgcctcgaagacttcaggaacagtcagccagcagtgaggatggaattgaatcagtcctgtctgattttgatgatgacaccggtctgatagaagtctggataatcctgctggagcagctgacagcggctgtgtccaattgtccacggcagcaccaaccaccaactctggatttactctttgagctgttgagagatgtgacgaaaacaccaggaccagggtttggtatctatgcagtggttcacctcctccttcctgtgatgtccgtttggctccgccggagccataaagaccattcctactgggatatggcctctgccaatttcaagcacgctattggtctgtcctgtgagctggtggtggagcacattcaaagctttctacattcagatatcaggtacgagagcatgatcaataccatgctgaaggacctctttgagttgctggtcgcctgtgtggccaagcccactgaaaccatctccagagtgggctgctcctgtattagatacgtccttgtgacagcgggccctgtgttcactgaggagatgtggaggcttgcctgctgtgccctgcaagatgcgttctctgccacactcaagccagtgaaggacctgctgggctgcttccacagcggcacggagagcttcagcggggaaggctgccaggtgcgagtggcggccccgtcctcctccccaagtgccgaggccgagtactggcgcatccgagccatggcccagcaggtgtttatgctggacacccagtgctcaccaaagacaccaaacaactttgaccacgctcagtcctgccagctcattattgagctgcctcctgatgaaaaaccaaatggacacaccaagaaaagcgtgtctttcagggaaattgtggtgagcctgctgtctcatcaggtgttactccagaacttatatgacatcttgttagaagagtttgtcaaaggcccctctcctggagaggaaaagacgatacaagtgccagaagccaagctggctggcttcctcagatacatctctatgcagaacttggcagtcatattcgacctgctgctggactcttataggactgccagggagtttgacaccagccccgggctgaagtgcctgctgaagaaagtgtctggcatcgggggcgccgccaacctctaccgccagtctgcgatgagctttaacatttatttccacgccctggtgtgtgctgttctcaccaatcaagaaaccatcacggccgagcaagtgaagaaggtcctttttgaggacgacgagagaagcacggattcttcccagcagtgttcatctgaggatgaagacatctttgaggaaaccgcccaggtcagccccccgagaggcaaggagaagagacagtggcgggcacggatgcccttgctcagcgtccagcctgtcagcaacgcagattgggtgtggctggtcaagaggctgcacaagctgtgcatggaactgtgcaacaactacatccagatgcacttggacctggagaactgtatggaggagcctcccatcttcaagggcgacccgttcttcatcctgccctccttccagtccgagtcatccaccccatccaccgggggcttctctgggaaagaaaccccttccgaggatgacagaagccagtcccgggagcacatgggcgagtccctgagcctgaaggccggtggtggggacctgctgctgccccccagccccaaagtggagaagaaggatcccagccggaagaaggagtggtgggagaatgcggggaacaaaatctacaccatggcagccgacaagaccatttcaaagttgatgaccgaatacaaaaagaggaaacagcagcacaacctgtccgcgttccccaaagaggtcaaagtggagaagaaaggagagccactgggtcccaggggccaggactccccgctgcttcagcgtccccagcacttgatggaccaagggcaaatgcggcattccttcagcgcaggccccgagctgctgcgacaggacaagaggccccgctcaggctccaccgggagctccctcagtgtctcggtgagagacgcagaagcacagatccaggcatggaccaacatggtgctaacagttctcaatcagattcagattctcccagaccagaccttcacggccctccagcccgcagtgttcccgtgcatcagtcagctgacctgtcacgtgaccgacatcagagttcgccaggctgtgagggagtggctgggcagggtgggccgtgtctatgacatcattgtgtagccgactcctgttctactctcccaccaaataacagtagtgagggttagagtcctgccaatacagctgttgcattttccccaccactagccccacttaaactactactactgtctcagagaacagtgtttcctaatgtaaaaagcctttccaaccactgatcagcattggggccatactaaggtttgtatctagatgacacaaacgatattctgattttgcacattattatagaagaatctataatccttgatatgtttctaactcttgaagtatatttcccagtgcttttgcttacagtgttgtccccaaatgggtcattttcaaggattactcatttgaaaacactatattgatccatttgatccatcatttaaaaaataaatacaattcctaaggcaatatctgctggtaagtcaagctgataaacactcagacatctagtaccagggattattaattggaggaagatttatggttatgggtctggctgggaagaagacaactataaatacatattcttgggtgtcataatcaagaaagaggtgacttctgttgtaaaataatccagaacacttcaaaattattcctaaatcattaagattttcaggtattcaccaatttccccatgtaaggtactgtgttgtacctttatttctgtatttctaaaagaagaaagttctttcctagcagggtttgaagtctgtggcttatcagcctgtgacacagagtacccagtgaaagtggctggtacgtagattgtcaagagacataagaccgaccagccaccctggctgttcttgtggtgtttgtttccatccccaaggcaaacaaggaaaggaaaggaaagaagaaaaggtgccttagtcctttgttgcacttccatttccatgccccacaattgtctgaacataaggtatagcatttggtttttaagaaaacaaaacattaagacgcaactcattttatatcaacacgcttggaggaaagggactcagggaagggagcagggagtgtggggtggggatggattatgatgaaatcattttcaatcttaaaatataatacaacaatcttgcaaaattatggtgtcagttacacaagctctagtctcaaaatgaaagtaatggagaaagacactgaaatttagaaaattttgtcgatttaaaatatttctcctatctaccaagtaaagttaccctatgtttgatgtctttgcattcagaccaatatttcaggtggatatttctaagtattactagaaaatacgtttgaaagctttatcttattatttacagtatttttatatttcttacattatcctaatgattgaaaactcctcaatcaagcttacttacacacattctacagagttatttaaggcatacattataatctcccagccccattcataatgaataagtcaccctttaaatataagacacaaattctacagtattgaaataaggatttaaaggggtatttgtaaactttgccctccttgagaaatatggaactaccttagaggttaagaggaaggcagtgttctgacttctttaggtgatctgaaaaaaacacccttatcatccagtgtaccatctagagatcaccacagaatccatttttttcccagttccacaaaacactctgtttgccttcagtttttactcactagacaataattcaagtttagaaacaggtaatcagctatttgatcttaaaaggcaatgaattgttgggatatcagtgaactatgttgtatacttttgaatttttacattttataaatggaattgaaagttggataactgctttttttaaattttccaacagaagtaacaccacagttgctttgtttctttttatagcttacctgaggttcagttcttctttgtgaacctgtgagtactccacagtttactgggggaaaaggcttcagtaaagcagaggctagaattacagtatttatacatagcaacttttcataaagtagaaaaattcaaaggaagctgtctcaatttgagaataccagctgggcacggtggctcacgcctgtaatcccagcacttactttgggaggccaaggtgggcagataacctgcggtcaggagtttgagaccaggctggacaacatggtgaaacctcgtctctactaaaaatacaaaaattagccaggtgtggtaggatgcacctgtaatcccagctacttaggaggccgagacaggagaatcgctcgaacccaggaggcggacgttgcagtgagccaagattgcaccattgcactccagactgggtgacaagagtgaaactccatct

SEQ ID NO: 398 - DNA, 1264 bp, Homo sapiens
ggagggagcagtcggtcgctgcgccccggcgggccactttcccgggaccccgctcgtcttccttgggccgagattttccactgcgcccctccgagtacccgggttccaaacccctagccacgacatggaagaatttttgcaacgcgccaaatctaaactgaatcgaagcaaacgcttggagaaggtccatgtggttattgggcctaaatcgtgtgacttggattctctcatttctaccttcacatatgcttactttctagacaaggtcagtccaccaggggttctgtgtttaccagtgctgaacataccaagaactgaattcaactacttcaccgagacgaggtttattttagaagagctaaatatttccgaatcattccacatattccgggatgaaattaacctgcatcagctaaatgatgaagggaagttatcgataacacttgttggcagcagtgtgctggcgagtgaagacaaaactttagaatcagcagttgtcaaagtcattaatccggttgagcagagcgatgccaacgttgagttccgagagtcttcctcttctctcgtgctaaaggagattctccaagaggctcctgagctcatcaccgagcaactggctcatcgcctcagaggtagcattcttttcaagtggatgaccatggaatcagagaagatctcagagaagcaggaggaaattctttctatcctggaagaaaaatttcctaacttgcctccaagagaggacatcatcaacgtcctacaggagacccagttcagtgctcagggtttaagtattgaacagacaatgttgaaagatctaaaggagctgtcagatggagaaataaaagtggccattagtactgtgagcatgaaccttgaggtaagggtgggaatgcttttttagcattgattgatttcccacaattgcagtctgagcaactggaatgtaactctctccattggataagtccatgatagtcctttgcttctttgtgatacatttgacttggaatatagtggcaggttattatttgggtgaaaacactatgctaagtcaatgaaaaatgccaaacctggattctcaagatgaatgctctttcattcatctcagtaaaacaaagcctaaaacaaacactcagatgtgggtgtatatttaacctgtttaatagcaattatgatatgtgtgattaggttcacttccatattttctgtgtaccaccctgtattgttcatagaacttttcttaaaaaaaaaaaaaaaaaaa

SEQ ID NO: 399 - DNA, 2912 bp, Homo sapiens
tgaggagaacaaaaaagagagagagagccgagcgggggagcgatcgagggagctgagccgagagaaagagccgccgggcgctgcctcgccagacctcgctgggaccccggggccaccgggaggcacttttgtggaggggggagggggggcgacctcggcagcctcggcgcacgaagcgtccgagggcagcgtggggcgggctgcgacctctgcatcggtggactgcatttttaattaaggattcccagcagctctttgggatttttacagcttccactcatgtgttgacacccgcgtccaggagaaactcgctccaagtgcatctagcgcctgggacctgagacggcgttggcctttcgtgcatgcaaatccagggatttaggttttgtttgggatttccttttctttctttccttttttttttctttttgcagggagtaagaagggagctgggggtatcaacaagcctgcctttcggatcctgcgggaaaagcccatgtagttaagcgctttggtttaaaaaaaaggcaaggtaaaggcagggctttccagacacatttaggggttcgcgcgagcgctttgtgctcatggaccagccgcacaacttttgaaggctcgccggcccatgtggggtctttctggcggcgcgccgcctgcagcccccctaaagcgcgggggctggagttgttgagcagccccgccgctgtggtccatgtagccgctggccgcgcgcggactgcggctcggcgtgcgcgtgttcccggccgtcccgcctcggcgagctccctcatgttgtcgccctgcggcgccccttcgacgacaggctgtgcgcggtctgcacggcgctccgcggcggagcttcatgtggggctgcgacccgcgcagccggcgcctcgctgagggaacggacccccggtaaccggagaccgcctcccccccacccctggcgccaaaggatatcgtatgttcaggtccaaacgctcggggctggtgcggcgactttggcgaagtcgtgtggtccccgaccgggaggaaggcggcagcggcggcggcggtggcggcgacgaggatgggagcttgggcagccgagctgagccggccccgcgggcaagagagggcggaggctgcggccgctccgaagtccgcccggtagccccgcggcggccccgggacgcagtgggacagcgaggcgcccagggcgcggggaggcgccggcgcgcagggggccccccgaggcccatgtcggagccaggggccggcgctgggagctccctgctggacgtggcggagccgggaggcccgggctggctgcccgagagtgactgcgagacggtgacctgctgtctcttttcggagcgggacgccgccggcgcgccccgggacgccagcgaccccctggccggggcggccctggagccggcgggcggcgggcggagtcgcgaagcgcgctcgcggctgctgctgctggagcaggaactcaaaaccgtcacgtactcgctgctgaagcggctcaaggagcgctcgctggacacgctgctggaggcggtggagtcccgcggcggcgtgccgggcggctgcgtgctggtgccgcgcgccgacctccgcctgggcggccagcccgcgccgccgcagctgctgctcggccgcctctttcgctggcccgacctgcagcacgccgtggagctgaagcccctgtgcggctgccacagcttcgccgccgccgccgacggccctaccgtgtgctgcaacccctaccacttcagccggctctgcgggcccgaatctccgccacctccctactctcggctgtctcctcgcgacgagtacaagccactggatctgtccgattccacattgtcttacactgaaacggaggctaccaactccctcatcactgctccgggtgaattctcagacgccagcatgtctccggacgccaccaagccgagccactggtgcagcgtggcgtactgggagcaccggacgcgcgtgggccgcctctatgcggtgtacgaccaggccgtcagcatcttctacgacctacctcagggcagcggcttctgcctgggccagctcaacctggagcagcgcagcgagtcggtgcggcgaacgcgcagcaagatcggcttcggcatcctgctcagcaaggagcccgacggcgtgtgggcctacaaccgcggcgagcaccccatcttcgtcaactccccgacgctggacgcgcccggcggccgcgccctggtcgtgcgcaaggtgccccccggctactccatcaaggtgttcgacttcgagcgctcgggcctgcagcacgcgcccgagcccgacgccgccgacggcccctacgaccccaacagcgtccgcatcagcttcgccaagggctgggggccctgctactcccggcagttcatcacctcctgcccctgctggctggagatcctcctcaacaaccccagatagtggcggccccggcgggaggggcgggtgggaggccgcggccaccgccacctgccggcctcgagaggggccgatgcccagagacacagcccccacggacaaaaccccccagatatcatctacctagatttaatataaagttttatatattatatggaaatatatattatacttgtaattatggagtcatttttacaatgtaattatttatgtatggtgcaatgtgtgtatatggacaaaacaagaaagacgcactttggcttataattctttcaatacagatatattttctttctcttcctccttcctcttccttactttttatatatatatataaagaaaatgatacagcagagctaggtggaaaagcctgggtttggtgtatggtttttgagatattaatgcccagacaaaaagctaataccagtcactcgataataaagtattcgcattataaaaaa

SEQ ID NO: 400 - DNA, 1709 bp, Homo sapiens
aggccccgcttcgcgctaacgcttgcgatggttgaattcccctcctcacgccagcctaggagaagaagttcgtagtcccagaggtgaggcaggaggcggcagtttctggcgggtgagggcggagctgaagtgacagcggaggcggaagcaacggtcggtggggcggagaagggggctggccccaggaggaggaggaaacccttccgagaaaacagcaacaagctgagctgctgtgacagaggggaacaagatggcggcgccgaaggggagcctctgggtgaggacccaactggggctcccgccgctgctgctgctgaccatggccttggccggaggttcggggaccgcttcggctgaagcatttgactcggtcttgggtgatacggcgtcttgccaccgggcctgtcagttgacctaccccttgcacacctaccctaaggaagaggagttgtacgcatgtcagagaggttgcaggctgttttcaatttgtcagtttgtggatgatggaattgacttaaatcgaactaaattggaatgtgaatctgcatgtacagaagcatattcccaatctgatgagcaatatgcttgccatcttggttgccagaatcagctgccattcgctgaactgagacaagaacaacttatgtccctgatgccaaaaatgcacctactctttcctctaactctggtgaggtcattctggagtgacatgatggactccgcacagagcttcataacctcttcatggactttttatcttcaagccgatgacggaaaaatagttatattccagtctaagccagaaatccagtacgcaccacatttggagcaggagcctacaaatttgagagaatcatctctaagcaaaatgtcctatctgcaaatgagaaattcacaagcgcacaggaattttcttgaagatggagaaagtgatggctttttaagatgcctctctcttaactctgggtggattttaactacaactcttgtcctctcggtgatggtattgctttggatttgttgtgcaactgttgctacagctgtggagcagtatgttccctctgagaagctgagtatctatggtgacttggagtttatgaatgaacaaaagctaaacagatatccagcttcttctcttgtggttgttagatctaaaactgaagatcatgaagaagcagggcctctacctacaaaagtgaatcttgctcattctgaaatttaagcatttttcttttaaaagacaagtgtaatagacatctaaaattccactcctcatagagcttttaaaatggtttcattggatataggccttaagaaatcactataaaatgcaaataaagttactcaaatctgtgaagactgtatttgctataactttattggtattgtttttgtagtaatttaagaggtggatgtttgggattgtattattattttactaatatctgtagctattttgttttttgctttggttattgtttttttcccttttcttagctatgagctgatcattgctccttctcacctcctgccatgatactgtcagttaccttagttaacaagctgaatatttagtagaaatgatgcttctgctcaggaatggcccacaaatctgtaatttgaaatttagcaggaaatgacctttaatgacactacattttcaggaactgaaatcattaaaattttatttgaataaaaaaaaaaaaaaa

SEQ ID NO: 401 - DNA, 2537 bp, Homo sapiens
gaggtggaggcgagcgaacagagggagggacccgcccgccgcgccccggccgctgggcatgtgtgtccgcaggcgcccgacgctgccgatgtcccggggctgagcagcgcccaggtgtcccggacagtgcgtgcgagcgtgtgtgtccgcgcaggcgagcaccgcgccggccctgagcctcccgctcgctccccacggccgcggtgcatgttcgcctcctgccactgtgtgccgagaggcaggaggaccatgaaatgatccactttcggagctccagcgtcaaatcgctcagccaggagatgagatgcaccatccggctgctggacgactcggagatctcctgccacatccagagggaaaccaaagggcagtttctcattgaccacatctgcaactactacagcctgctggagaaggactactttggcattcgctatgtggacccagagaagcaaaggcactggcttgaacctaacaagtccatcttcaagcaaatgaaaactcatccaccatacaccatgtgctttagagtgaaattctacccacatgaacccttgaagattaaagaagagctcacaagataccttttataccttcagattaaaagggacatttttcatggccacctgctgtgctccttttctgatgctgcctacctgggtgcctgtattgttcaagctgagcttggtgattacgatcctaatgagcatcctgagaattacatcagtgagtttgagattttccccaagcagtcacagaagctggaaagaaaaatagtggaaattcataaaaatgaactcagggggcagagcccaccagttgctgaatttaacttgctcctgaaagctcacactttggaaacctacggggtggatcctcacccatgcaaggattcaacaggcacaacaacatttttaggattcacagctgcaggctttgtggtctttcagggaaataagagaatccatttgataaaatggccagatgtctgcaaattgaagtttgaagggaagacattttatgtgattggcacccagaaggagaaaaaagccatgttggcattcaatacttcaacaccagctgcctgcaaacatctttggaagtgtggagtggaaaaccaggccttttataagtatgcaaaatccagtcagatcaagactgtatcaagcagcaagatattttttaaaggaagtagatttcgatatagtgggaaagttgccaaagaggtggtggaggccagttccaagatccagagggagcctcctgaggtgcacagagccaacattactcagagccgcagttcccactccttgaacaaacagctcatcattaacatggaacccctgcagcccctgcttccttcccccagcgagcaagaagaagaacttcctctgggtgagggtgttccattgcctaaagaggagaacatttctgctcccttgatctccagctccccagtgaaggcagcccgggagtatgaagatccccctagtgaagaggaagataaaataaaagaagaacctttaaccatctctgaactagtgtacaacccaagtgccagcctgctccccacccctgtggatgacgatgagattgacatgctctttgactgtccttctaggcttgagttggaaagagaagacacagattcatttgaggatctggaagcagatgaaaacgcctttttgattgctgaagaagaggagctgaaggaggctcgccgtgctttgtcgtggagctacgacattctgactggccatattcgggtgaacccactggtcaagagtttttccaggctccttgtggtgggcctgggactgctgctctttgtatttcccctgctcctcctccttttggagtcaggtattgatctctccttcttatgcgaaatccgccagacaccagagtttgagcagtttcactatgaatactactgtcccctcaaggagtgggtggctgggaaagtccacctcatcctctacatgctgggttgctcatgaagttaatctctcacgtgactaagggctatattcaatgctagtgatttctttttttcagcaaatgcctggttctgaagggtcacggggctgtcaacaggtgttccttactcataattgattattcaaacctttaagttagctttccataattcactgcacttaaataagtttaaatcaaatacagttattttagttacaggttaggaagatggtctttaaataaccaaaaatatgtttattttttattatagtgtagacatacccttcatctattatatcataatacatgttacattggactgaattagattttcccatttctaatagttggcaccattataagctataaggttcagaatcagaattttagtaacaactcaagagaaagttgttgaatataatccttagtgaagacagtgtcctctaaccaatgcctatacaactaaatttatgctgggtttttggttttgtttttttaaaaatatttttatgtgttcaaactattttggtaaatttttagcaaaaaaaaaaaaaaaa

SEQ ID NO: 402 - DNA, 2127 bp, Homo sapiens
gctgctaagagactaaatgcaaaagaaattgttttaaaagcccagatcttagctggaggaagaggaaaaggtgtcttcaatagtggtttgaaaggaggtgttcatttaacaaaagaccctaatgttgtgggacagctggctaaacagatgattgggtacaatctagcgacaaaacaaactccaaaagaaggtgtgaaagttaacaaggtgatggttgctgaagccttggatatttccagagaaacctacctggcaattctgatggaccggtcctgcaatggccccgtgctggtgggcagcccccaggggggcgtcgacattgaagaggtggctgcttcaaacccggagctcatttttaaggagcaaattgacatttttgaaggaataaaggacagccaagctcagcggatggccgaaaatctaggcttcgttgggcctttgaaaagccaggctgcagatcaaattacgaagctgtataatctcttcctgaaaattgatgctactcaggtggaagtgaatccctttggtgaaactccagaaggacaagttgtctgttttgatgccaagataaactttgatgacaacgcagaattccgacaaaaagacatatttgctatggacgacaaatcagagaatgagcccattgaaaatgaagctgccaaatatgatctaaaatacataggactagatgggaacattgcctgctttgtgaatggtgctgggctcgccatggctacttgtgatatcattttccttaatggtgggaagccagccaacttcttggatcttggaggtggtgtaaaggaagctcaagtatatcaagcattcaaattgctcacagctgatcctaaggttgaagccatccttgtcaatatatttggtggtatcgtcaactgtgccatcattgccaatgggatcaccaaagcctgccgggagctagaactcaaggtgcccctggtggtccggcttgaaggaaccaacgtccaagaggcccagaagatactcaacaacagcggactccccattacttcagccattgacctggaggatgcagccaagaaggctgtggccagtgtggccaagaagtgatgtctttgtcctgatccaatggagaaagaaagccatttttccgtaaaaagggatggttcatcattgtgaaagaaatggttatctcattggggaagaaaaggggagggggaaggcaagaatcactgaaaaatcttaaatctgtgttttctggaataagatatctagacagcctaaatctgattttggtctttataaaaataatatcttgtgttctcatacttttctgtcactgtaagcctgcccagtaggcagtgttttgcagactttggggagtggtctatgtggccaaatattgtgtgtatagacagaatttgaaatcaagtcctgcttcatttacaagaattttggtgggcatctaatcctacataatgaaaaagaaaaacagaccatttaaaaactcagacaagattatatttaatatattaattactaaaaaggcataagattacactgaacatattagctactaaaaaggcactgctaagacattcaagcaaatagctattacacactactgcagattttacaggtttctaattctaacatatgtttgaaaaatccgtgagtattccaaaatatatttaataatggaatatctgcattaatataccattcatgtgtttttaccatttgccttaatattgaatatactgtttacctcacactaaaaagaaaaccagaagccttatttgtgattttgggagtggaagcttccatttttgtgtcaaaaatgaatcctgattcttatggaaatctctgttattaagatatttcaagatgagacaacactgaagatcaaattgtgtttagtatcactatcttctctcctcgtttctctcttactcctcatcctcccagaatctaccagtttatggtagaaagatgggaaccttatttgaatgtgttttttttttccatgatgtccaattttgttgtgggaaaggatttggataaaatttttgtttaaattttggtagatttttatctatacaaatttaaataaaattatgttttgtaagctgaaaaaaaaaaaaaaaa

SEQ ID NO: 403 - DNA, 4507 bp, Homo sapiens
cggcggcagtgtctgtggtggccgcggcggcgagagcgacggtcccatctttcccaccctcttggttgccgctggccacacgccctccgctggcggcgacttctcagctccgtgcgcccgggctggacagtgagcctcgagaggagacgcgggcggctagagccggagtggggcgagccgcggaacccggccgggagccgcgcgaggcgtgatcggagggtatggttggcatggaattgaatttcatctgtctgtgggaattgtaagcaagattgccatcacgaaagccaaagtggatttctccagtgtggtgtgcctgcccccttccgtcattgctgtgaatgggctggacggaggaggggccggcgaaaatgatgatgaaccagtgctcgtgtccttatctgcggcacccagtccccagagtgaagctgttgccaatgaactgcaggagctctccttgcagcccgagctgaccctaggcctccaccctggcaggaatcccaatttgcctccacttagtgagcggaagaatgtgctacagttgaaactccagcagcgccggacccgggaagaactggtgagccaagggatcatgccgcctttgaaaagtccagccgcatttcatgagcagagaaggagcttggagcgggccaggacagaggactatctcaaacggaagattcgttcccggccggagagatcggagctggtcaggatgcacattttggaagagacctcggctgagccatccctccaggccaagcagctgaagctgaagagagccagactagccgatgacctcaatgagaagattgcacagaggcctggccccatggagctggtggagaagaacatccttcctgttgagtccagcctgaaggaagccatcattgtgggccaggtgaactatcccaaagtagcagacagctcttccttcgatgaggacagcagcgatgccttatcccccgagcagcctgccagccatgagtcccagggttctgtgccgtcacccctggaggcccgagtcagcgaaccactgctcagtgccacctctgcatcccccacccaggttgtgtctcaacttccgatgggccgggattccagagaaatgcttttcctggcagagcagcctcctctgcctcccccacctctgctgcctcccagcctcaccaatggaaccactatccccactgccaagtccacccccacactcattaagcaaagccaacccaagtctgccagtgagaagtcacagcgcagcaagaaggccaaggagctgaagccaaaggtgaagaagctcaagtaccaccagtacatccccccggaccagaagcaggacaggggggcaccccccatggactcatcctacgccaagatcctgcagcagcagcagctcttcctccagctgcagatcctcaaccagcagcagcagcagcaccacaactaccaggccatcctgcctgccccgccaaagtcagcaggcgaggccctgggaagcagcgggacccccccagtacgcagcctctccactaccaatagcagctccagctcgggcgcccctgggccctgtgggctggcacgtcagaacagcacctcactgactggcaagccgggagccctgccggccaacctggacgacatgaaggtggcagagctgaagcaggagctgaagttgcgatcactgcctgtctcgggcaccaaaactgagctgattgagcgccttcgagcctatcaagaccaaatcagccctgtgccaggagcccccaaggcccctgccgccacctctatcctgcacaaggctggcgaggtggtggtagccttcccagcggcccggctgagcacggggccagccctggtggcagcaggcctggctccagctgaggtggtggtggccacggtggccagcagtggggtggtgaagtttggcagcacgggctccacgccccccgtgtctcccaccccctcggagcgctcactgctcagcacgggcgatgaaaactccacccccggggacacctttggtgagatggtgacatcacctctgacgcagctgaccctgcaggcctcgccactgcagatcctcgtgaaggaggagggcccccgggccgggtcctgttgcctgagccctggggggcgggcggagctagaggggcgcgacaaggaccagatgctgcaggagaaagacaagcagatcgaggcgctgacgcgcatgctccggcagaagcagcagctggtggagcggctcaagctgcagctggagcaggagaagcgagcccagcagcccgcccccgcccccgcccccctcggcacccccgtgaagcaggagaacagcttctccagctgccagctgagccagcagcccctgggccccgctcacccattcaaccccagcctggcggccccagccaccaaccacatagacccttgtgctgtggccccggggcccccgtccgtggtggtgaagcaggaagccttgcagcctgagcccgagccggtccccgccccccagttgcttctggggcctcagggccccagcctcatcaagggggttgcacctcccaccctcatcaccgactccacagggacccaccttgtcctcaccgtgaccaataagaatgcagacagccctggcctgtccagtgggagcccccagcagccctcgtcccagcctggctctccagcgcctgccccctctgcccagatggacctggagcacccactgcagcccctctttgggacccccacttctctgctgaagaaggaaccacctggctatgaggaagccatgagccagcagcccaaacagcaggaaaatggttcctcaagccagcagatggacgacctgtttgacattctcattcagagcggagaaatttcagcagatttcaaggagccgccatccctgccagggaaggagaagccatccccgaagacagtctgtgggtcccccctggcagcacagccatcaccttctgctgagctcccccaggctgccccacctcctccaggctcaccctccctccctggacgcctggaggacttcctggagagcagcacggggctgcccctgctgaccagtgggcatgacgggccagagcccctttccctcattgacgacctccatagccagatgctgagcagcactgccatcctggaccaccccccgtcacccatggacacctcggaattgcactttgttcctgagcccagcagcaccatgggcctggacctggctgatggccacctggacagcatggactggctggagctgtcgtcaggtggtcccgtgctgagcctagcccccctcagcaccacagcccccagcctcttctccacagacttcctcgatggccatgatttgcagctgcactgggattcctgcttgtagctctctggctcaagacggggtggggaaggggctgggagccagggtactccaatgcgtggctctcctgcgtgattcggcctctccacatggttgtgagtcttgacaatcacagcccctgctttttcccttccctgggaggctagaacagagaagcccttactcctggttcagtgccacgcagggcagaggagagcagctgtcaagaagcagccctggctctcacgctggggttttggacacacggtcagggtcagggccatttcagcttgacctccttttttgaggtcagggggcactgtctgtctggctacaatttggctaaggtaggtgaagcctggccaggcgggaggcttctcttctgacccagggctgagacaggttaaggggtgaatctccttcctttctctccctgctttgctgtgaagggagaaattagcctgggcctctaccccctattccctgtgtctgccaaccccaggatcccagggctccctgccattttagtgtcttggtgtagtgtaaccatttagtggttggtggcaacaattttatgtacaggtgtatatacctctatattatatatcgacatacatatatatttttgggggggggcggacaggagatgggtgcaactccctcccatcctactctcacagaagggcctggatgcaaggttacccttgagctgtgtgccacagtctggtgcccagtctggcatgcagctacccaggcccacccatcacgtgtgattgacatgtaggtaccctgccacggcctatgccccacctgccctgcttcctggctccttatcagtgccatgagggcagaggtgctacctggccttcctgccaggagctctccacccactcacattccgtccccgccgcctcactgcagccagcgtggccctaggacaggaggagcttcgggcccagcttcaccctgcggtggggctgaggggtggccatctcctgccctggggccactggcttcacattctgggctgactcataggggagtaggggtggagtcaccaaaaccagtgctgggacaaagatggggaaggtgtgtgaactttttaaaataaacacaaaaacacaggaaaaaaaaaaaaaaaaa

SEQ ID NO: 404 - DNA, 4147 bp, Homo sapiens
ttcggcgccctgctcttcctcatgttggcatccccggccacggagaccaccgtcctcatgtcccagactgaggccgacctggccctgcggcccccgcctcctcttggcaccgcggggcagccccgcctcgggccccctcctcgccgagcgcgccgcttctccgggaaggctgagccccggccgcgctcttctcgtctcagccgccgtagctcagtcgacttggggctgctgagctcttggtccctgccagcctcacccgctccggacccccccgatcctccggactccgctggtcctggccccgcgaggagcccaccgcctagctccaaagaaccccccgagggcacgtggaccgagggagcccctgtgaaggctgcggaagactccgcgcgtcccgagctcccggactctgcagtgggcccggggtccagggagccgctaagggtccctgaagctgtggccctagagcggcggcgggagcaggaagaaaaggaggacatggagacccaggctgtggcaacgtcccccgatggccgatacctcaagtttgacatcgagattggacgtggctccttcaagacggtgtatcgagggctagacaccgacaccacagtggaggtggcctggtgtgagctgcagactcggaaactgtctagagctgagcggcagcgcttctcagaggaggtggagatgctcaaggggctgcagcaccccaacatcgtccgcttctatgattcgtggaagtcggtgctgaggggccaggtttgcatcgtgctggtcaccgaactcatgacctcgggcacgctcaagacgtacctgaggcggttccgggagatgaagccgcgggtccttcagcgctggagccgccaaatcctgcggggacttcatttcctacactcccgggttcctcccatcctgcaccgggatctcaagtgcgacaatgtctttatcacgggacctactggctctgtcaaaatcggggacctgggcctggccacgctcaagcgcgcctcctttgccaagagtgtcatcgggaccccggaattcatggcccccgagatgtacgaggaaaagtacgatgaggccgtggacgtgtacgcgttcggcatgtgcatgctggagatggccacctctgagtacccgtactccgagtgccagaatgccgcgcaaatctaccgcaaggtcacttcgggcagaaagccgaacagcttccacaaggtgaagatacccgaggtgaaggagatcattgaaggctgcatccgcacggataagaacgagaggttcaccatccaggacctcctggcccacgccttcttccgcgaggagcgcggtgtgcacgtggaactagcggaggaggacgacggcgagaagccgggcctcaagctctggctgcgcatggaggacgcgcggcgcggggggcgcccacgggacaaccaggccatcgagttcctgttccagctgggccgggacgcggccgaggaggtggcacaggagatggtggctctgggcttggtctgtgaagccgattaccagccagtggcccgtgcagtacgtgaacgggttgctgccatccagcgaaagcgtgagaagctgcgtaaagcaagggaattggaggcactcccaccagagccaggacctccaccagcaactgtgcccatggcccccggtccccccagtgtcttcccccctgagcctgaggagccagaggcagaccagcaccagcccttccttttccgccacgccagctactcatctaccacttcggattgcgagactgatggctacctcagctcctccggcttcctggatgcctcagaccctgcccttcagccccctgggggggtgccatccagcctggctgagtcccatctctgcctgccctcggcttttgccctatccattccacgttctggccctggaagtgacttttcccccggggacagctatgcctcagatgcagcttcaggccttagcgatgtgggagaagggatgggacaaatgaggagacccccagggaggaatctccggcgcagaccccgatcccggctgcgggtcactagtgtctcagaccagaatgacagagtggttgagtgccagctacagacccataacagcaagatggtgaccttccgatttgatctggatggggacagcccggaagagattgcagctgccatggtatataacgagttcattctgccttcggagcgagatggatttctcagacggattcgggagattatccagcgagtggagaccctgttgaagagagacactggccccatggaggctgctgaagacaccctaagcccccaggaggagccagcaccattacctgccctgcccgtccccctcccagacccatccaatgaagagctccagagcagcacctccctggagcacaggagctggacagccttctccacctcctcatcttctcctggaactcctttgtctcctggaaacccattttcccctggaacccccatttccccaggtcccatcttccccatcacttctcccccatgtcatcccagcccctccccattctcccccatttcttcccaggtctcctcaaatccctctccacaccccaccagctctccacttccattctcctccagcacacccgagtttccggtcccactctctcagtgtccctggagttctctccccacgacttctccacctacgttctctcccacttgttctcaggtcactcttagttcccctttctttcctccgtgcccctccacttcttccttcccctccaccacagcagcccctctcctttctctggctagtgccttctcactggctgtgatgactgtggcccagtccctgctgtccccctcacctgggctcctttcccagtctcctccagcccctcctagtcccctccctagcctgccccttccccctcccgttgctcctggtggccaggaaagcccttcaccccacacagctgaggtggagagtgaggcctcaccacctcctgctcggcccctcccaggggaagccaggctggcgcccatctctgaagagggaaagccgcagcttgttgggcgtttccaagtgacttcatccaaggaaccggctgagcctcttcccttgcagccaacatcccccactctctctggttctccaaaaccttcaacccctcagctcacttcagagagctcagatacagaggacagtgctggaggcgggccagagaccagggaagctctggctgagagcgaccgtgcagctgagggtctgggggctggagttgaggaggaaggagatgatgggaaggaaccccaagttgggggcagcccccaacccctgagccatcccagcccagtgtggatgaactactcctacagcagcctgtgtttgagcagcgaggagtcagaaagcagtggggaagatgaggagttctgggctgagctgcagagtcttcggcagaagcacttgtcagaggtggaaacactacagacactacagaaaaaagaaattgaagatttgtacagccggctggggaagcagcccccaccgggtattgtggccccagctgctatgctgtccagccgccagcgccgcctctccaagggcagcttccccacctcccgccgcaacagcctacagcgctctgagcccccaggccctggcatcatgcgaaggaactctctgagtggcagcagcaccggctcccaggagcagcgggcaagcaagggggtgacattcgccggggatgttggcaggatgtgaattcagaacagaagccatgtatctcccccacaccagggcccaccatggagcttgtgttctcagaatctgatgctttctgatcaacaaaactgagcaaggaagatcccaacactgaaggggtagaaggccaggggggcatggagagtgcagctccattatagtgaagagccaaacatatgtgaactgtttgctgtgtggaggtgttagttctgctgcctaccatcttcatctctagcacctcccctgccaagagtcaaccactaagcaatcccacccaagcctggatgcttctagaggggcccactcccagctgggagagtgtaggggatatgctcacaccacattagcagcaaccaataaaaatgctggaaacaagaaaaaaaaaaaaaaaaaa

SEQ ID NO: 405 - DNA, 5871 bp, Homo sapiens
cctgcggcgaggatggagggcctggcagtgcggttgctgcgcggcagcaggctgctaagaagaaatttcctgacttgtttgtcttcttggaagattcctcctcatgtctcaaaatcttcccagtcagaagctctactcaatataacaaataatggaatacactttgctcccctgcaaacatttacagatgaggaaatgatgataaagagttcagttaaaaaatttgctcaggaacaaattgcacctttggtttcaaccatggatgaaaattcgaaaatggagaaatcagtaatacaaggattatttcaacaagggttgatgggtattgaagttgacccagaatatggaggcacaggagcttcatttttatccactgtgctcgtgatagaggaattagccaaagttgatgcatctgtggctgtcttttgtgagatccagaacacattaattaacacactgattagaaaacatggaacagaagaacaaaaggccacctatttgcctcagctcactacagaaaaagtaggaagtttctgcctttcagaggctggagcaggtagtgactcatttgctttgaagaccagagctgataaagagggagattattatgtcctcaatggatcaaagatgtggatcagcagtgctgagcacgcagggctctttctggtgatggcaaatgtagaccctaccattggatataagggaattacctccttcttagtagatcgtgatactccgggccttcatatagggaaacctgaaaacaaattggggctcagagcttcttccacctgcccgttaacattcgaaaatgtcaaggttccagaagccaatatcttgggacaaattggacatggctataagtatgccatagggagtctcaatgaaggtagaataggaattgctgcacagatgctgggactggcgcaaggatgttttgactacactattccatatattaaagaaaggatacaatttggcaaaagactatttgattttcagggcctccaacaccaagtggctcacgtggccacccagctggaagctgcaagattactaacatacaatgctgctaggcttttagaagctggaaagccattcataaaagaagcgtcaatggccaaatactatgcatcagagattgcaggacaaacaacgagtaaatgtatcgagtggatggggggagtaggctacaccaaagattaccctgtggagaaatacttccgagatgcaaagattggtacgatatatgaaggagcttccaacatccagttgaacaccattgcaaagcatatcgatgcagaatactgacgtctataggagtgggacccctccctggtgtcactgctgtaaaattttaaacggttgtgtcttgttgggagtaagtgccttgcgtgggaataaacttccacagcattcgaatattttaatgaagcccttagtcagggtcctggtgttggcctttttggttttctcttttcaggctgtttaacttaggcacaggagatccacttttaaacttgggaaataagcacctgtatttttttccaaaactgtttttaaagctgtatacgcatacatatatatatttttactctgtcttactctgtcacccaggctagagtgcagtggcgcgatctcagctcactgcagccttgacctcctgggttccagtgattctcatgcctcatcctcccaagtagctggaactacaggtgtgcaccaccatgcctggttcatttttgtgtttttagtagagatggggttttaccatattgcccaggctggtcttctggcttctggatatcgcccaccttggcctcccaaagtgctgggattacagggatgagccaccgtgcctggctgggtatttatattatcattctagtttcagagtatacagaagtttcatcccatcatttggaaaaataaaggcatctgaagtacaatattacttatagaaatagtttatattcctattaaatcttaatcttgtggcatcagggaaatatttgttacatagtaggcaatttttatccagtactttatagattcaactctaagttgcaagcgaagtcaaaactgatgaaaatttatttagaaaaatctaaaaattctggttttaaatatgagaatcagtggaaaataagggtataattttgtaggtcatatgattgaagaaaatattattttaacaatgtaaagcaatatgatttgttactataattaacctgtataaaagatacattttatggtggtttcagtaggtcattttaaaaaccaatgtgcattagttttcaagtataaggtttaagtaatttggtttaataatcagaaaatattcaatacagtgttggatattctgtcatgcactatttttcagttgacaatttctgtattttaattgaatactgtttcttcagtcatggttattgcactttatcctgaataataattcagaaattgggttttggttcagtgattctcaagaaaaagatctcttgcccattaagaagtgtatcaaaatctcataaggaatgagggagagaagggggctgtagagtttgaaaaagcatattcaatattaaaatagttttatatttgggaaggcaaaaatgaatctattgttttgcaatataggttataaacaggcaaaatgcaataaaatatatatctggttgtattagtctgttttcacgctgctgataaagacatacctgagaccaggaagaaaaagaggtttaattggacttacagttccacatgactggggaggcctcagaatcatggtgggaggcaaaaagcacttcttacatggcggcagcaagagaaaatgagaaagaagcaaaagtggaaacccctaataaacctatcagatcttgtgagacttactatcacgagaatagcacaggaaagactggcccccatgattcaattacctcccccgggtccctcccacaacacatgggaattctgagagataccatttaagttgagatttcagtggggacacagccaaaccatatcattctacccctggcacctccaaatctcatgtcctcacatttcaaaaccaatcatgccttcccaacagtcccccaaagtcttaactcatttcagcattaacccaaaagtccgcagtccaaagtttcatctgagacaaggcaagtcccttccacttatgaacctgtaaaatcaaaagtaaactagttacttcctagatacaatgggggtacaggtattgggtaaatacagccattccaaatgggagaaattggccaacacaaaagggtaacagggcccatgcaagtccaaaattcagcagggcagtcaaattttaaacctccaaaatgatcacctttgactccacgtctcacaatcatctctctcaagttcgaagttccacaaatctctaaggcaagggaaagatgctgccagtctctttgctaaaacacagcaagagtcacctttactccagttcccaaaaagtttttcatctccatctgagaccacctcagcctgaattttattgtcaatattgctatcagcattttgggcaaagccattcagcaagtatctaggaagttccaaactttcccacattttcctgtcttcttctgagcccttcaaactgttccaacctctgcctgttacccagttccaaacttgctttcatatttttggctatcttttcagcaatgccccactctactgttagcagtttactgtattagtctgttttcacactgctgataaagacattcctcaagattgtgaagaaaaagaggtttaattggactgacagttccacatggccggggaggcctcagaatcatggcgggaggtgaaaagcacttcgtacatggtggtggcaagagaaaatgaagaagaagcaaaagtggaaacccctgataaacccatcagatctcatgagacttactatcatgagaatagcacaggaaagactggcccccctgattcgatgacctccccctgggtccctcccacaacatgtgggaattccagaagataaattcaagttgcaatttcagtggggacatagccaaaccatatcactggtgatgccacttcttcagtattagggattctcagtcagaagagaccccctgtgtggcctgagtcccctcaggaggaaggtggacaacagagaaatgagagttttgatattttctgaaagaggaacatgtgttagagatgaagaatcttccaaggctcatgcagttgcttagaataatcattactgttatatgagaaacattttagtaatttaataaaaggataatgtttatttaaaaaacctgacttttccagagtaattttgttttgcacattcatgtttattgaagtggactaatttctataatgcaaatcagagttaaatattaaaaattgtgtaaatacaattgacataggaattacattaaaatattaggaagaaacaaggacaaatttagaccttgaatccgaagagataaagcttacttgactttcaaatggagagatgatgaaaacccactcattcactctttcagaacaaaaagacagtcatctgataagagtatgacatggatgaaatgccctacaggggccttggacatctttaatttctgcgattatgtgaaagaggtggactttacagataatggagcagaagccaacattagtaaaaggaatcccaacttcttcccatagaattagaaacatgtgaaagtacaataaacttcttgttcaaattaccagcatcagagagcttcccatttgcatctagaccttgaatttatatttattgatcaagttctaatttgtatgtatattttgtgcatattcaccaataacagttaaaattaattatgtgttatagttaatatatgcacctaccttcttccgttagtgcatcagtaaatgtgttattttgtcatttttccaaagagagtgttgtaggttttccctgtagttcttcctttatagcttttcttctgataaccatgacttcaggagctttaaaactatctatcttgcatttgtgtctggcggagaactagccatcagcctcctgaagcctgccatcattgttaatttgaggactgggctgtcttggggctcagaaggtaaagaactatttgagcagatgtgtgtgggtggcactggattccacccaactgccaagttagtattgttagagatttcattttacaacacaaaaataagcctgtgtcaaagattttaaaatcatggaaagttaaaatctagaaagaccttagagaaccagccaaccaactctctcattttaaaagtgaaggattcatagcacagattacttgcctaagatcatccaggaacgaagacaagaatccaaatgtacttggggacaagaattagtccccaaattcagtgttcttcctagtattaaacattgcccctttcgacaaattttggatttcattcttgttatatttcagtactcttgctgatttattttaggtttaactggtaaagaatgaacatttcagaagtgttaggattagtcagtgtcatcgcttatgtatatgaatcacttgccaaagacactggctctcctcagctgtaaccagcatgtcaaatgtgaagattattgtgtgggatcctttggtttcattgttatgatgtattttataaatgtactagttatatccttgtttatgtatttttgctgatctttcataaagcagaatggtatgtatcggattgttttaatgttatatattggattgtattcgatgttacaaaaccaatattctatggagaatgaaaaaaataaaggactaaattaactggaaaaaaaaaaaaaaaaaaaaaaaaaaaaaaaaaaaa

SEQ ID NO: 406 - DNA, 5776 bp, Homo sapiens
gctcacccaggaaaaatatgcaatcgtcccattgatatacaggccactacaatggatggagttaacctcagcaccgaggttgtctacaaaaaaggccaggattataggtttgcttgctacgaccggggcagagcctgccggagctaccgtgtacggttcctctgtgggaagcctgtgaggcccaaactcacagtcaccattgacaccaatgtgaacagcaccattctgaacttggaggataatgtacagtcatggaaacctggagataccctggtcattgccagtactgattactccatgtaccaggcagaagagttccaggtgcttccctgcagatcctgcgcccccaaccaggtcaaagtggcagggaaaccaatgtacctgcacatcggggaggagatagacggcgtggacatgcgggcggaggttgggcttctgagccggaacatcatagtgatgggggagatggaggacaaatgctacccctacagaaaccacatctgcaatttctttgacttcgatacctttgggggccacatcaagtttgctctgggatttaaggcagcacacttggagggcacggagctgaagcatatgggacagcagctggtgggtcagtacccgattcacttccacctggccggtgatgtagacgaaaggggaggttatgacccacccacatacatcagggacctctccatccatcatacattctctcgctgcgtcacagtccatggctccaatggcttgttgatcaaggacgttgtgggctataactctttgggccactgcttcttcacggaagatgggccggaggaacgcaacacttttgaccactgtcttggcctccttgtcaagtctggaaccctcctcccctcggaccgtgacagcaagatgtgcaagatgatcacagaggactcctacccagggtacatccccaagcccaggcaagactgcaatgctgtgtccaccttctggatggccaatcccaacaacaacctcatcaactgtgccgctgcaggatctgaggaaactggattttggtttatttttcaccacgtaccaacgggcccctccgtgggaatgtactccccaggttattcagagcacattccactgggaaaattctataacaaccgagcacattccaactaccgggctggcatgatcatagacaacggagtcaaaaccaccgaggcctctgccaaggacaagcggccgttcctctcaatcatctctgccagatacagccctcaccaggacgccgacccgctgaagccccgggagccggccatcatcagacacttcattgcctacaagaaccaggaccacggggcctggctgcgcggcggggatgtgtggctggacagctgccggtttgctgacaatggcattggcctgaccctggccagtggtggaaccttcccgtatgacgacggctccaagcaagagataaagaacagcttgtttgttggcgagagtggcaacgtggggacggaaatgatggacaataggatctggggccctggcggcttggaccatagcggaaggaccctccctataggccagaattttccaattagaggaattcagttatatgatggccccatcaacatccaaaactgcactttccgaaagtttgtggccctggagggccggcacaccagcgccctggccttccgcctgaataatgcctggcagagctgcccccataacaacgtgaccggcattgcctttgaggacgttccgattacttccagagtgttcttcggagagcctgggccctggttcaaccagctggacatggatggggataagacatctgtgttccatgacgtcgacggctccgtgtccgagtaccctggctcctacctcacgaagaatgacaactggctggtccggcacccagactgcatcaatgttcccgactggagaggggccatttgcagtgggtgctatgcacagatgtacattcaagcctacaagaccagtaacctgcgaatgaagatcatcaagaatgacttccccagccaccctctttacctggagggggcgctcaccaggagcacccattaccagcaataccaaccggttgtcaccctgcagaagggctacaccatccactgggaccagacggcccccgccgaactcgccatctggctcatcaacttcaacaagggcgactggatccgagtggggctctgctacccgcgaggcaccacattctccatcctctcggatgttcacaatcgcctgctgaagcaaacgtccaagacgggcgtcttcgtgaggaccttgcagatggacaaagtggagcagagctaccctggcaggagccactactactgggacgaggactcagggctgttgttcctgaagctgaaagctcagaacgagagagagaagtttgctttctgctccatgaaaggctgtgagaggataaagattaaagctctgattccaaagaacgcaggcgtcagtgactgcacagccacagcttaccccaagttcaccgagagggctgtcgtagacgtgccgatgcccaagaagctctttggttctcagctgaaaacaaaggaccatttcttggaggtgaagatggagagttccaagcagcacttcttccacctctggaacgacttcgcttacattgaagtggatgggaagaagtaccccagttcggaggatggcatccaggtggtggtgattgacgggaaccaagggcgcgtggtgagccacacgagcttcaggaactccattctgcaaggcataccatggcagcttttcaactatgtggcgaccatccctgacaattccatagtgcttatggcatcaaagggaagatacgtctccagaggcccatggaccagagtgctggaaaagcttggggcagacaggggtctcaagttgaaagagcaaatggcattcgttggcttcaaaggcagcttccggcccatctgggtgacactggacactgaggatcacaaagccaaaatcttccaagttgtgcccatccctgtggtgaagaagaagaagttgtgaggacagctgccgcccggtgccacctcgtggtagactatgacggtgactcttggcagcagaccagtgggggatggctgggtcccccagcccctgccagcagctgcctgggaaggccgtgtttcagccctgatgggccaagggaaggctatcagagaccctggtgctgccacctgcccctactcaagtgtctacctggagcccctggggcggtgctggccaatgctggaaacattcactttcctgcagcctcttgggtgcttctctcctatctgtgcctcttcagtgggggtttggggaccatatcaggagacctgggttgtgctgacagcaaagatccactctggcaggagccctgacccagctaggaggtagtctggagggctggtcattcacagatccccatggtcttcagcagacaagtgagggtggtaaatgtaggagaaagagccttggccttaaggaaatctttactcctgtaagcaagagccaacctcacaggattaggagctggggtagaactggctatccttggggaagaggcaagccctgcctctggccgtgtccacctttcaggagactttgagtggcaggtttggacttggactagatgactctcaaaggcccttttagttctgagattccagaaatctgctgcatttcacatggtacctggaacccaacagttcatggatatccactgatatccatgatgctgggtgccccagcgcacacgggatggagaggtgagaactaatgcctagcttgaggggtctgcagtccagtagggcaggcagtcaggtccatgtgcactgcaatgccaggtggagaaatcacagagaggtaaaatggaggccagtgccatttcagaggggaggctcaggaaggcttcttgcttacaggaatgaaggctgggggcattttgctggggggagatgaggcagcctctggaatggctcagggattcagccctccctgccgctgcctgctgaagctggtgactacggggtcgccctttgctcacgtctctctggcccactcatgatggagaagtgtggtcagaggggagcaatgggctttgctgcttatgagcacagaggaattcagtccccaggcagccctgcctctgactccaagagggtgaagtccacagaagtgagctcctgccttagggcctcatttgctcttcatccagggaactgagcacagggggcctccaggagaccctagatgtgctcgtactccctcggcctgggatttcagagctggaaatatagaaaatatctagcccaaagccttcattttaacagatggggaaagtgagcccccaagatgggaaagaaccacacagctaagggagggcctggggagccccaccctagcccttgctgccacaccacattgcctcaacaaccggccccagagtgcccaggcactcctgaggtagcttctggaaatggggacaagtcccctcgaaggaaaggaaatgactagagtagaatgacagctagcagatctcttccctcctgctcccagcgcacacaaacccgccctccccttggtgttggcggtccctgtggccttcactttgttcactacctgtcagcccagcctgggtgcacagtagctgcaactccccattggtgctacctggctctcctgtctctgcagctctacaggtgaggcccagcagagggagtagggctcgccatgtttctggtgagccaatttggctgatcttgggtgtctgaacagctattgggtccaccccagtccctttcagctgctgcttaatgccctgctctctccctggcccaccttatagagagcccaaagagctcctgtaagagggagaactctatctgtggtttataatcttgcacgaggcaccagagtctccctgggtcttgtgatgaactacatttatcccctttcctgccccaaccacaaactctttccttcaaagagggcctgcctggctccctccacccaactgcacccatgagactcggtccaagagtccattccccaggtgggagccaactgtcagggaggtctttcccaccaaacatctttcagctgctgggaggtgaccatagggctctgcttttaaagatatggctgcttcaaaggccagagtcacaggaaggacttcttccagggagattagtggtgatggagaggagagttaaaatgacctcatgtccttcttgtccacggttttgttgagttttcactcttctaatgcaagggtctcacactgtgaaccacttaggatgtgatcactttcaggtggccaggaatgttgaatgtctttggctcagttcatttaaaaaagatatctatttgaaagttctcagagttgtacatatgtttcacagtacaggatctgtacataaaagtttctttcctaaaccattcaccaagagccaatatctaggcattttcttggtagcacaaattttcttattgcttagaaaattgtcctccttgttatttctgtttgtaagacttaagtgagttaggtctttaaggaaagcaacgctcctctgaaatgcttgtcttttttctgttgccgaaatagctggtcctttttcgggagttagatgtatagagtgtttgtatgtaaacatttcttgtaggcatcaccatgaacaaagatatattttctatttatttattatatgtgcacttcaagaagtcactgtcagagaaataaagaattgtcttaaatgtc

SEQ ID NO: 407 - DNA, 4620 bp, Homo sapiens
agcgtgggcgtgggacgtggagacccggaggagggcggcgggacccgggcggggaaaggcgcggcgtggcttggctcaggtgcgcttctcccacctggcagctcgctcagggctgtggggggcgcctgtgagggcggccccgccttgcgggctggagattaatattaagattggaagtttgtgtcttttgctggatattggaaattgaatgtaatggcaacagaatttataaagagttgctgtggaggatgtttctatggtgaaacagaaaaacacaacttttctgtggaaagagattttaaagcagcagtcccaaatagtcaaaatgctactatctctgtacctccattgacttctgtttctgtaaagcctcagcttggctgtactgaggattatttgctttccaaattaccatctgatggcaaagaagtaccatttgtggtgcccaagtttaagttatcttacattcaacccaggacacaagaaactccttcacatctggaagaacttgaaggatctgccagagcatcttttggagatcgaaaggtagaactttccagttcatcccagcacggacctagctatgatgtgtataacccattctatatgtatcagcacatttcacctgatttgagtcgacgctttcctccccgttcagaagtgacgagactgtatggatcggtttgtgatttaaggacgaacaaacttcccggttcccctgggctaagcaaatctatgtttgatcttacaaactcatctcagcgattcatccagagacatgattcattgtccagtgtacccagtagttcttcttcaaggaaaaattctcaggggagtaacagaagcctggatacaattactctatcaggagatgaaagggactttgggagactgaatgtgaaattgttttataattcttcagtagaacagatctggatcacagttttacagtgcagagatttaagttggccctctagttatggagacactcctactgtttctataaaaggaatacttacattgcccaaaccagtgcatttcaaatcttcagccaaggaaggttccaacgctattgaatttatggaaacgtttgtatttgctattaaacttcaaaatctacaaactgtaagacttgtatttaagattcaaacccagactcccaggaagaaaaccattggagaatgctcaatgtcactcagaacccttagcacacaggaaatggattactctttggatataacaccaccttcaaaaatttctgtttgccatgcagaacttgaattggggacttgttttcaagcagtaaatagcagaattcagttacaaattcttgaggcacggtaccttccaagctcatcaacacctctgactttgagttttttcgtgaaggtgggaatgtttagctcgggagagttgatttataagaaaaagacacgcttactgaaggcctccaatggaagagtcaagtggggagagactatgatttttccacttatacagagtgaaaaagaaattgtttttctcattaagctttacagtcgaagctctgtaagaagaaaacactttgtgggccagatttggataagtgaagacagtaataacattgaagcagtgaaccagtggaaagagacagtaataaatccagaaaaggttgttatcaggtggcacaaattaaatccatcttgaagacttcacacattaatttggtgaagaacttgacattcttttagaagacttatgatttcaatttgctaccaatgagaagaggcaaatcaacaaatttgtcaatttatgggggctataattatggtatataatgtatctgatagaaaatttgataagaaaatgtaatgaattttatcagatatccaaagtaaaggaaatgttttaaaactgcaacaagagacacagacagtaaaatcaaagtattattaggatgactaaataaattataaagtctgtgagaatatcaaccatagatagttctttctatattatgtttatgcttttgtattttaagctttacttagatattcaaaacctggtatatcaagtctctgttagtactattggcatttagaagactttaccattatttcagtgctaggcattattgattaggtcttggctccactgtttacctcttgctatgtattttctcccggtaaaaatgaattgaaccatttcaactattttctatatttggagaaagtttgtgccctgtgttttataatttttttacccataagacatcacattatccctttgtaagctacttatctccaaaaaacttcagaaatagaaaactacattttggcaggaataattgaaaacaccagaaggttgaggtttaattggaaacccagaatatacatactttgctgttttcttccctcaaatattttactatttgttttatttggagttaaaataagagtatcatccatatggtccatcctaattcacagaattaaatgagcttaaatagaaaattcagtattttatgataatcacttcgtttttagtttttaaaatttagattattctataatttaccgtgtttgagtattttctcatttttttcataaccatacctgattatactgtgtaacaaatattttctattgcagttttctttccagtacttattagaactcagtatttggaaataatttcagcttaattgaccataagaactgtggccaaaaagaacagttttttggagaggcagatgacattatacctgattttagaaaatctcactttatttttgctaataagtagactaagtgctctgtgttctcagtcttccctttttttctgcccccattcttactttgtcccaggcatgcagagaaggatggtgatattttaggccaggagtataccttgctataacctaagcatgccttctttattccagctcctatgttctgtgtatatcattaacattttcccaaataaacacttaattctcttttccctaggtgccatctcctcaagctacaaaatgtccacatcttatatcccctttgcttctactgctctgattttgtggtaccagtactctctgccactgaacattttgaaatatttttgttttagatttgcaaaaaatgacatataggtcagtactcacatggatttttaagataaatcacctgtgtgataatattttgaatctgagacgaatacaacttttaaaaattgtttttaaaaatagactttttttttagagcagttgtaggttaacagaaaaattgagaggaagatagagatttcctttctcccctgacaaagccctcaacagcctcccaggctatcagtatcctgcaccacaatggtacatttgttacaatcaatgaacctactctgaaacatcattatcatccaaagttcatggtttacattagagtcccctcttggtgttatacatgctagaggacaaatatatgatgatatgtatgcatcattataatatagtatagtttcgctgccctaaacatcctctgcaaatgcaactattttaatgggtaccaaagaagtaaatgtatttactggcttttagataataaataacgggctttattgtttattttaaaagctacaatttgttttagctggtttctctgttctattaatgctttgaatttccaaatttaatatatgtagtcatgcatttaacttaatatttaattatttgatttatttaattttctatattcttacaatgtatgtatgatgtataatttaagggaaagctatgacttctcagtttcttagaatcctaggtaaataaaacaataaaaagaaaacccttacatttaaaagagctttcaggtacagaagtattgatacaactaagatcctaaatgttttaattagtgtttacttaagcctttttcaggtgaggaggtactaatgctggttatttccttgaagctttatgtggacctataaataaaaatccaatctcctgctaataggtatgcatattgtgagaaaaacgttaggagctggtagtaaaaaatgagattctatgccaaaataacttctcttcatatttgcctaggcatttcttgacctttacccacttacgcaaggagaaggaaatcataatgatgtcatgtgatcagaggaaaccatggaagggttcacgctgatagctgatagcttttacagtgctcattcctaacagtggatttacttgtaagctttcagatcaacacaaatagctgcagcctgggttaaaatataacatcactatttggcttttgttttgcatgatttttaaaagcagtactcctagggaaatggcctctgaagtatatcagtttcatctcttaccaagactgttaagaagaaactagtgggattttgaacaagttatataattgtggtctgaaaagaccctaaactgaagttctgtttaaatatagttacatgaatttctctgatactaatgtactcaacagccaggtataaactatatctcctagtaacattttccatttttgtttaatcaaatacttgcttatgaaggatttcagaaatttgtaataaatgtcagcttttgatagcatagcagtaattgacatttcaagaaaaaaaaaaaaaaaa

SEQ ID NO: 408 - DNA, 1667 bp, Homo sapiens
ctcccgggctggcagcagggccccagcggcaccatgtctgccctcggagtcaccgtggccctgctggtgtgggcggccttcctcctgctggtgtccatgtggaggcaggtgcacagcagctggaatctgcccccaggccctttcccgcttcccatcatcgggaacctcttccagttggaattgaagaatattcccaagtccttcacccggttggcccagcgcttcgggccggtgttcacgctgtacgtgggctcgcagcgcatggtggtgatgcacggctacaaggcggtgaaggaagcgctgctggactacaaggacgagttctcgggcagaggcgacctccccgcgttccatgcgcacagggacaggggaatcatttttaataatggacctacctggaaggacatccggcggttttccctgaccaccctccggaactatgggatggggaaacagggcaatgagagccggatccagagggaggcccacttcctgctggaagcactcaggaagacccaaggccagcctttcgaccccaccttcctcatcggctgcgcgccctgcaacgtcatagccgacatcctcttccgcaagcattttgactacaatgatgagaagtttctaaggctgatgtatttgtttaatgagaacttccacctactcagcactccctggctccagctttacaataattttcccagctttctacactacttgcctggaagccacagaaaagtcataaaaaatgtggctgaagtaaaagagtatgtgtctgaaagggtgaaggagcaccatcaatctctggaccccaactgtccccgggacctcaccgactgcctgctcgtggaaatggagaaggaaaagcacagtgcagagcgcttgtacacaatggacggtatcaccgtgactgtggccgacctgttctttgcggggacagagaccaccagcacaactctgagatatgggctcctgattctcatgaaataccctgagatcgaagagaagctccatgaagaaattgacagggtgattgggccaagccgaatccctgccatcaaggataggcaagagatgccctacatggatgctgtggtgcatgagattcagcggttcatcaccctcgtgccctccaacctgccccatgaagcaacccgagacaccattttcagaggatacctcatccccaagggcacagtcgtagtgccaactctggactctgttttgtatgacaaccaagaatttcctgatccagaaaagtttaagccagaacacttcctgaatgaaaatggaaagttcaagtacagtgactatttcaagccattttccacaggaaaacgagtgtgtgctggagaaggcctggctcgcatggagttgtttcttttgttgtgtgccattttgcagcattttaatttgaagcctctcgttgacccaaaggatatcgacctcagccctatacatattgggtttggctgtatcccaccacgttacaaactctgtgtcattccccgctcatgagtgtgtggaggacaccctgaaccccccgctttcaaacaagttttcaaattgtttgaggtcaggatttctcaaactgattcctttctttgcatatgagtatttgaaaataaatattttcccagaatataaataaatcatcacatgattatttt

SEQ ID NO: 409 - DNA, 2242 bp, Homo sapiens
agccggcgcgcggcggcggcaggaagtctgtgcccgagaacagcagaaataagagccagggagggaccgcggccgcggcggcggcggcgagagcgaaagaggaaactgcagaggaggaagctgcgccgcagcccgagccgcccggcatccccgccgcctctgcgcccgcgccgcgcccccggcgccccctccccagcgcgcccccggccgctcctccgcgccgcgctcgtcggccatggcccgggagaacggcgagagcagctcctcctggaaaaagcaagctgaagacatcaagaagatcttcgagttcaaagagaccctcggaaccggggccttttccgaagtggttttagctgaagagaaggcaactggcaagctctttgctgtgaagtgtatccctaagaaggcgctgaagggcaaggaaagcagcatagagaatgagatagccgtcctgagaaagattaagcatgaaaatattgttgccctggaagacatttatgaaagcccaaatcacctgtacttggtcatgcagctggtgtccggtggagagctgtttgaccggatagtggagaaggggttttatacagagaaggatgccagcactctgatccgccaagtcttggacgccgtgtactatctccacagaatgggcatcgtccacagagacctcaagcccgaaaatctcttgtactacagtcaagatgaggagtccaaaataatgatcagtgactttggattgtcaaaaatggagggcaaaggagatgtgatgtccactgcctgtggaactccaggctatgtcgctcctgaagtcctcgcccagaaaccttacagcaaagccgttgactgctggtccatcggagtgattgcctacatcttgctctgcggctaccctcctttttatgatgaaaatgactccaagctctttgagcagatcctcaaggcggaatatgagtttgactctccctactgggatgacatctccgactctgcaaaagacttcattcggaacctgatggagaaggacccgaataaaagatacacgtgtgagcaggcagctcggcacccatggatcgctggtgacacagccctcaacaaaaacatccacgagtccgtcagcgcccagatccggaaaaactttgccaagagcaaatggagacaagcatttaatgccacggccgtcgtcagacatatgagaaaactacacctcggcagcagcctggacagttcaaatgcaagtgtttcgagcagcctcagtttggccagccaaaaagactgtctggcaccttccacgctctgtagtttcatttcttcttcgtcgggggtctcaggagttggagccgagcggagacccaggcccaccactgtgacggcagtgcactctggaagcaagtgactggccctggaggtggggcccggggtcggggctggggaaggggagccccagggtcgccagagccgcgagccactccagcgagaccccaccttgcatggtgccccttcctgcataggactggaagaccgaagtttttttatggccatattttctactgcaattctgaagtgttcatttctcacaaactgtactgactcgaggggcgctgatttcataggatctggtgctgtatatacgaatcttgcaaagctctaactgaacggaccttcttattcctctcccctaacaccatcgtttccactcttctcagtgtaggtaaccgtctatggtgtgttttttcattaatgacaaaaaaaaaaaggtttcaactggattatttaaatattggtaaatattgtgcattagggtttgtttttccttttaagaagtatgtcctttgtatctctaagttacatgacctatatcttttcctctttaatagtagttttatgttaacctttaagagatttgtttttcctcaaaggagaatttaaaggtattttttaaaattctaataagaggatcagccgggtgcaatgactcatgcctgtaatcccagcacgttgggaggccaagtcgggcggatcacaaggtcaggagatcaaggccatcctggccaacatggtgaaaccccacgtctactaaaaatacaaaaaattagccgggcgtggtggcacacacctgtagtcccggctactcgggaggctgaggcaggagaattgcttgaacccgggagacggaggttgcagtgagctgagatcgtgccactgcactccagcctgggtgacagagcaagactctgtctcaaaa

SEQ ID NO: 410 - DNA, 616 bp, Homo sapiens
gaccggaccatggcgcaggggcagcgcaagtttcaggcgcacaaacccgcaaagagtaagacggcagcggcagcctctgaaaagaatcggggcccaagaaaaggcggtcgtgttatcgctcccaagaaggcgcgcgtcgtgcagcagcaaaagctcaagaagaacctagaagtcggaatccggaagaagatcgaacatgacgtggtgatgaaagccagcagcagcctgcccaagaagctggcactgctgaaggccccagccaagaagaaaggggcagctgccgccacctcctccaagacaccttcctgaggacgctggccccagtgcaggccaacatcccaccccctacctccatatgggaccttgcaagtcatcccacaggctgcactgtcaggaagaggaccctgtcccccagcactgggcttcacctagaacttcagtgggggccaagggtgctgagaacccagcaatgaccaggaagatacagtcactaacttcatctgtccccgtgccccttcccaggtcctgcctccacaggtttaacccagaacaataaacctggctttgtcagtaaaaaaaaaaaaaaaaaaaaaaaaaaaaaaaaaaaaaaaaaaaa

SEQ ID NO: 411 - DNA, 3010 bp, Homo sapiens
cgggaggaggcgcgggcgcgccgggagggaccggcggcggcatgggccgggggccctgggatgcgggcccgtctcgccgcctgctgccgctgttgctgctgctcggcctggcccgcggcgccgcgggagcgccgggccccgacggtttagacgtctgtgccacttgccatgaacatgccacatgccagcaaagagaagggaagaagatctgtatttgcaactatggatttgtagggaacgggaggactcagtgtgttgataaaaatgagtgccagtttggagccactcttgtctgtgggaaccacacatcttgccacaacacccccgggggcttctattgcatttgcctggaaggatatcgagccacaaacaacaacaagacattcattcccaacgatggcaccttttgtacagacatagatgagtgtgaagtttctggcctgtgcaggcatggagggcgatgcgtgaacactcatgggagctttgaatgctactgtatggatggatacttgccaaggaatggacctgaacctttccacccgaccaccgatgccacatcatgcacagaaatagactgtggtacccctcctgaggttccagatggctatatcataggaaattatacgtctagtctgggcagccaggttcgttatgcttgcagagaaggattcttcagtgttccagaagatacagtttcaagctgcacaggcctgggcacatgggagtccccaaaattacattgccaagagatcaactgtggcaaccctccagaaatgcggcacgccatcttggtaggaaatcacagctccaggctgggcggtgtggctcgctatgtctgtcaagagggctttgagagccctggaggaaagatcacttctgtttgcacagagaaaggcacctggagagaaagtactttaacatgcacagaaattctgacaaagattaatgatgtatcactgtttaatgatacctgtgtgagatggcaaataaactcaagaagaataaaccccaagatctcatatgtgatatccataaaaggacaacggttggaccctatggaatcagttcgtgaggagacagtcaacttgaccacagacagcaggaccccagaagtgtgcctagccctgtacccaggcaccaactacaccgtgaacatctccacagcacctcccaggcgctcgatgccagccgtcatcggtttccagacagctgaagttgatctcttagaagatgatggaagtttcaatatttcaatatttaatgaaacttgtttgaaattgaacaggcgttctaggaaagttggatcagaacacatgtaccaatttaccgttctgggtcagaggtggtatctggctaacttttctcatgcaacatcgtttaacttcacaacgagggaacaagtgcctgtagtgtgtttggatctgtaccctacgactgattatacggtgaatgtgaccctgctgagatctcctaagcggcactcagtgcaaataacaatagcaactcccccagcagtaaaacagaccatcagtaacatttcaggatttaatgaaacctgcttgagatggagaagcatcaagacagctgatatggaggagatgtatttattccacatttggggccagagatggtatcagaaggaatttgcccaggaaatgacctttaatatcagtagcagcagccgagatcccgaggtgtgcttggacctacgtccgggtaccaactacaatgtcagtctccgggctctgtcttcggaacttcctgtggtcatctccctgacaacccagataacagagcctcccctcccggaagtagaattttttacggtgcacagaggacctctaccacgcctcagactgaggaaagccaaggagaaaaatggaccaatcagttcatatcaggtgttagtgcttcccctggccctccaaagcacattttcttgtgattctgaaggcgcttcctccttctttagcaacgcctctgatgctgatggatacgtggctgcagaactactggccaaagatgttccagatgatgccatggagatacctataggagacaggctgtactatggggaatattataatgcacccttgaaaagagggagtgattactgcattatattacgaatcacaagtgaatggaataaggtgagaagacactcctgtgcagtttgggctcaggtgaaagattcgtcactcatgctgctgcagatggcgggtgttggactgggttccctggctgttgtgatcattctcacattcctctccttctcagcggtgtgatggcagatggacactgagtggggaggatgcactgctgctgggcaggtgttctggcagcttctcaggtgcccgcacagaggctccgtgtgacttccgtccagggagcatgtgggcctgcaactttctccattcccagctgggccccattcctggatttaagatggtggctatccctgaggagtcaccataaggagaaaactcaggaattctgagtcttccctgctacaggaccagttctgtgcaatgaacttgagactcctgatgtacactgtgatattgaccgaaggctacatacagatctgtgaatcttggctgggacttcctctgagtgatgcctgagggtcagctcctctagacattgactgcaagagaatctctgcaacctcctatataaaagcatttctgttaattcattcagaatccattctttacaatatgcagtgagatgggcttaagtttgggctagagtttgactttatgaaggaggtcattgaaaaagagaacagtgacgtaggcaaatgtttcaagcactttagaaacagtacttttcctataattagttgatatactaatgagaaaatatactagcctggccatgccaataagtttcctgctgtgtctgttaggcagcattgctttgatgcaatttctattgtcctatatattcaaaagtaatgtctacattccagtaaaaatatcccgtaattaagaaaaaaaaaaaaaaa

SEQ ID NO: 412 - DNA, 4080 bp, Homo sapiens
tttttttttttttttacagctgttcctgctgattgctttttaagctaggctcaagtgtggggccacggaatccttcaggtgcccttcaaatcagacattacatttcagctctcagggctagaatgcttccccctcttatcttgggcaggtctttgaagaagccagtttagccttggtaattttgaatttggccatagtatacggaggagagctaggtagctatcaaaacgcttagacaaacgtatggtaaaatgcagcccagcctgaacctccgcaaaacccccaaacctggagcagcaagtgggcaaaggagtgtgtgtttggggcagggtactgagtcccatatgtaatcaagagacctggagggcccaaggaagtcagtgacacccccacaagctacatatcctccaatggattgtggtggtcatctccggctaccgaagccaccttgcttattcccataggcttacaaacattatgatgcttcacacgagttgtgggtgaagtgaaggaattggaaagtcccggtctaaggccctgcaaaactgctgtctggtaaaaacaagtgactatggcaaggccctgaatgtactacgtatagacttaagtcagtatttgtgcctaacagcaaagcatgccacaagaggctcctcaaaagccgggtaattgatgccattgttttcttgacctagttgaagagtcaaagaagagaaggtgatgcagaaacttctttccagtgaagtgacagatccaagcaaggaacacctgcctgtgaggggagcggtaggggagggggtagattcggcagcactcgggtagtggcagggaccacatattgtcggtgttaaccactgttatcactggcccaggtcgagtgaggacgagtcatttccccactaagcacttggggagtggcagggaccacatattgtcagtgttaaccactgttatgactggcccaggtcgggtgacgacgagccatttccgcactattgtcccttcttcctcactgcacccccagccctgcaccctcagctccaaatacacattctcgttcactcaacgtttgttgacacctagcgtgggccctgtgggatggggtaaaagttcggtgttgggaggagccccggtgacagatttttggttttggtggtggcttttgggcaaggacaggtcagttcataaaagatgacgccccaggtctggatcgaattctcctgggagccagaccaaagcaccttcctggactgcaaagtgtggaagccgccgcgggccgggcgcggggaggtgtcatgcgccggaacctgcgcttggggccaagctctggagctgacgcgcaggggcaaggcgccccgcgtcccggactggcggctccgcgcatgctcctcccaccggcgtcgcaggcctcgagaggctccggaagtactgggtgcagcctgatggcgcaggaggtagacacggcacagggcgccgagatgcggcggggcgcgggcgcggctcggggacgcgcttcctggtgctgggccctggcgctgctttggctcgcggtggttccgggctggtcccgggtctcgggcatcccctcccggcgccactggccggtgccctacaagcgctttgacttccgtccaaaacctgatccttattgtcaagctaagtatactttctgtccaactggctcacctatcccagttatggagggtgatgatgacattgaagtttttcgattacaagccccagtatgggaatttaaatatggagacctcctgggacacttgaaaattatgcatgatgccattggattcagaagtacattaactggcaagaactacacaatggaatggtatgaacttttccaacttggcaactgtacatttccccatctccgacctgaaatggatgcccctttctggtgtaatcaaggcgctgcctgcttttttgagggaattgatgatgttcactggaaggaaaatgggacattagttcaagtagcaactatatcaggaaacatgttcaaccaaatggcaaagtgggtgaaacaggacaatgaaacaggaatttattatgagacatggaatgtaaaagccagcccagaaaagggggcagagacatggtttgattcctacgactgttccaaatttgtgttaaggacctttaacaagttggctgaatttggagcagagttcaagaacatagaaaccaactatacaagaatatttctttacagtggagaacctacttatctgggaaatgaaacatctgtttttgggccaacaggaaacaagactcttggtttagccataaaaagattttattaccccttcaaaccacatttgccaactaaagaatttctgttgagtctcttgcaaatttttgatgcagtgattgtgcacaaacagttctatttgttttataattttgaatattggtttttacctatgaaattcccttttattaaaataacatatgaagaaatccctttacctatcagaaacaaaacactctctggtttataaaacaccttaattctactgctcttttttctccaatcaccagcatctgtttttcagggggtgattttacttttgtgaattccttagcctttcttccttggtgcataaagttaaaatgcacatcagcagaattgctgcatattaacatctcaggactcttctcttgtaaagaagctgaaattcgtactatattggccaaagtgagcgagttaggtgatcttggtttcaatttccgagcctttgttaatatggagaattatggttcatatcagttatgtaggacctttggacccagggtcctacagatagatatggtgtgcccagattttaaaaataccttcaaaaataaaaaatacattcagtgacattttcatggtgggagctcttctttctgatatggcagttacactttttcacttaagtgctttagtttagactaactttacaacttctataacttttggaaccaagtttagtatagtctgattacattccattcacctaactttagacattcgtttagacaccataactggagtgattgtgcttctagatgtggcaaatccagtgttaacacatatttctggctgagattttggaactagctagtaactggcttgtgttctttaagcatactaacatcactaaatcttaggatttaggattgctgtaaagatgtaagttgtgtatgtttggcaggtcacattgaatggcagtgataatgattaatcaaagaacaaatgtcatccttgatcttgcctaatgtagtttatgtgccaaactttccagggttttgtagtcacctagattttaagctgatagcatagtgcttcagcggttcttctaaccggggtatgcaggaacatggctgcagacacgtttgggtaaacaggcaccttctgacttcttcattgtttcctgtagttctccctcttcccacaaagctgtcagcgcagtggaagaggttgcacttctccgagagaggacaggtttctgttaagatcaccaagtagctgtgctttaattagagccagacaagctttcaaggtcctttaagtatttgatgatcaactgaacacgtttctattcaaggagaaaacaccattcagtaagaagatggagtagatatcagataaaacaattcacgtttaatatgtaaatgtaccaattatgtgattcagtttcaactttcaagtacttcctgagaggttagtacattattattgagctctcacagaaagcttaatcatagatataattaacctgatccaaatgagtaaagtggaccttagaaaggctaagtgatctttctctggctatccagctagtagtaatgaagtcaggtcttgaaccccggttctgctgactgaattggatgcactatagtacaggcttttagcaccgaagtgtggtcctcagaccagtgcctgccaaccagatgttactggtctgtgaggaaataagtacagatactgacaggaagcttttataaacaatttattggagtgtttttgtttctgttgggtctaattaaaaaaattggagcttgtaaaaaaaaaaaaaaaaa

SEQ ID NO: 413 - DNA, 2721 bp, Homo sapiens
agtctccgcgctgctgaggcgcgcccggccgctcccacggcctcccctccgccctgcggtcccgccgcctccggggcctcctgggaccctggccctcgccgggcaggacgccgccagcgctgaaggcgcagcccggaggccgcgcggatgcagatctgtggatccagcgtagcatctgtagcagctgggacatcattccaggttttgggcccggtgtgttggcaacaactggatctgaagatggcagtcagggtgctttggggtggtctcagcctgctccgagtgctgtggtgtctccttccgcagacgggctatgtgcacccagatgagttcttccagtcccctgaggtgatggcagaggacatcctgggcgttcaggccgcgcggccctgggagttttaccccagcagctcctgccgctcggtgctcttccccctgctgatctctggttccaccttctggctgctcaggctctgggaggagctggggccgtggcctggcctggtgagcggctatgcgctgctggtggggcctcgactcctcctcactgccctttcctttgctctggacggggccgtgtaccacctggccccgccgatgggggcggatcgctggaacgccctggccctgctgtctggttcctacgtcaccctggtcttctacacaaggaccttctccaacaccattgagggactcctcttcacgtggctgctggtgctggtatcctcccatgtaacgtggggccctacacgcaaggagccggcgccgggtccacggtggcgcagctggcttcttggaggcattgtggctgctggcttcttcaaccggcccacctttctggcctttgctgtggtccccctctacctctggggcactcgtggagccacaaaccctggtttgaagtctctgacccgggaggccctggtgctgctccctggggcagccctcacagcagcggtgtttgtggccacggacagctggtatttctccagccccgctacatccaggaaccttgtcctgacacctgtcaacttcttgcactacaacctgaatccccaaaacctggcgagacatggcacgcacgcgcggctcactcacctggcagtcaacggcttcctgctcttcggggtgctgcatgcccaggccctgcaggctgcgtggcaacggctgcaagtcggcctccaggcctctgcacaaatgggcctcctgagggcactgggtgcccggagcctgctgtccagccccaggtcctatctccttctcctctacttcatgcctctggccctgctatctgcctttagccaccaggaggctcggttcctgattcccctcctggtccccctggtcctgctttgtagtccacagacgcagcctgtgccttggaagggcactgtggtcctcttcaacgccctcggtgccctcctcttcggctgcctgcatcaggggggcctggtgcctggcctggagtacctggagcaggtggtccatgcccctgtgctcccaagcacacccacccactacacactcctcttcactcacacctacatgcccccccggcacctcctacacctcccaggcctgggggcaccagtggaggtggtggacatgggggggactgaggactgggccctgtgccaaaccctgaaaagcttcaccagacaaccagcctgccaagtggctggtgggccatggctctgccgcctctttgtggtaacccctggcaccaccaggcgtgccgtggagaagtgcagcttccccttcaagaatgaaacacttttatttccccatctgaccctggaggatccaccagccctgtcctccttgctgagtggggcttggagggaccacctcagtcttcacattgtggagctgggggaagaaacctgacaatatgacagagcacccactgcccaagactcagccatagaagatgccgccccaccttctacttgggtagctgggctgggacgctgggacaggaccccgtcctccttcatgactcccactgctgcctctcctgggcatggctgttagctgttctgccttctgggtgagctggcactcttctccctgagaccaaagatttgacctgtcggtcttgatgtcaaggtccccaaagaccaggttaagtgacgacacctgtctgttcctgccctgttgcttccagccactgtgatgtttgaaatatgtgatagtacctggttgtgaaaaaagacaatgaactgctagtgacattcctcaatgacctctcccaaacctcccatgatgccttacccttgctgtcatgacaaccctctggcttcctaagacccatctgcctatcgaaatatgtgcaagtcagtgagacgaagtatagagaacaggtggcccagatccaggggacccaacttctggccccttggtctgtcacctcctcgctgtgtgatcttgagaaagctccttccactcacccaccccacttcccagtctgttgggatcagaggaactttgaggtgtctgccggctaacattgtgtcattcctggagtccacagtacacgtcccctgcctcaacaggcacagctctcacaaagctcttcaagcatggaagtgggagttgtgttgtacttcatggcactctgatgcctgctgtctcagtgtttggttattatgcaaacaagtaatgtttgaaatatataatagcactggagattttctccctaaaaaaaaaaaaaaaaaaaaa

SEQ ID NO: 414 - DNA, 1082 bp, Homo sapiens
ttgtacaccacaaatatacccaacttttatttgtcaattacactttaataaagctgggggaagccactctttttttgggcacagcatccggcttttatttactaactttgagaacagagtaccttgatcaattaaatggtagggagcgctgtggagacagcatcctccccagtccgggaagagaggcctaggatgcctggggcccagcggcctcttccctcctggcgtccccggctgccctcgctcccaggccccgcagtctcatttgccgcttccgacgcgtgaccccggcgcgctagcgtccgggaccggtgacaggcgcggggtgcgccaagcagtcccatgtgtcccctccctctcgcagccgccgcagtcgctgcgccccgagcccctctccggctcctcaacagagggctcgccgccgccatgtctaccgcccagtcactcaaatccgtggactacgaggtgttcggaagagtgcagggtgtttgcttcagaatgtatacagaagatgaagctaggaaaataggagtggttggctgggtgaagaataccagcaaaggcaccgtgacaggccaagtgcaggggccagaagacaaagtcaattccatgaagtcctggctgagcaaggttggaagccctagttctcgcattgaccgcacaaacttttctaatgaaaaaaccatctctaagcttgaatactctaattttagtattagatactaatagaagagaaaaattgtaacacactgaacaatagatactgtatgttcttaagactatgtatactagaataatagtagcagagtagggtgaaaaggaactttctgttctgaaagctaagcgactgtacgtgctactaaaaatgtctgacactgaaataattttactcaactatgttttcaacaagcaaaaatatagtattctaagattaaaatgtcattacaaaatatttagtgtgaacatttaatttaaacttgtctcatggaatctttaatttcaatgaacattacagcatatatatgttatttggcgagacatcaaataaagttaaccatttaaaaattaaaaaaaaaaaaaaa

SEQ ID NO: 415 - DNA, 8456 bp, Homo sapiens
  misc_feature 3848, 5680, 5735, 5750, 5858, 8099, 8100, 8108, 8130, 8448: n = A,T,C or G
  misc_feature 3848, 5680, 5735, 5750, 5858, 8099, 8100, 8108, 8130, 8448: n = A,T,C or G
ctctcgcggcgcgaccgctcagtcacttcgcccagagacccggacctggtccgctggggagcaggcggccataaaccccctctctcccggttccctgacgccgcggcaggagctgttacaaacaccctgcggttggtctccgatgcccttcagtgaggtggggacgcctggaccctggtgagcgaaccccaagccaccccccaccccaactcagtgtcttcgccggcccccggcccgtacgcctgtctggtcgccatggctgaaaacacagagggggatctgaactccaacctgctccacgccccctaccacaccggggaccctcagctggacacggccatcgggcagtggctccgctgggataagaatcccaaaacaaaagagcagattgaaaacctgttacggaatgggatgaacaaggagctgcgagatcgtctttgttgccgaatgacttttgggactgcaggacttcgttctgccatgggggcagggttttgctatattaatgaccttacagtaatacagtcaacacaggggatgtacaaataccttgagagatgtttctcagacttcaagcagagaggctttgtggttgggtatgacactcggggtcaagtaactagcagctgcagcagccagaggcttgctaaactcactgctgcagtcttgctggccaaagatgttcctgtgtaccttttttcaagatatgttcctacaccttttgtaccatatgcagttcagaagctcaaagcagttgcaggtgtgatgattactgcctctcacaaccgcaaggaagacaatggatacaaggtttactgggaaactggtgctcagatcacatctcctcatgataaagaaattctaaaatgtatagaagaatgtgtggaaccctggaatggttcctggaatgataatttagtggataccagcccgctgaagagagaccctctgcaggacatttgcaggagatacatggaagatctgaaaaagatctgtttttacagggagttaaactcgaagaccaccttgaaatttgtgcacacatcttttcatggggtcggacatgactatgtgcagttggcttttaaagtgtttggttttaagcctccaattccagtaccagaacaaaaagatcctgatccagacttttctaccgttaaatgtccaaatcctgaagaaggagaatctgtgctggaactttccttgagactggcagagaaagaaaatgcccgggtagtgctagccacagatcctgatgcagacagactggcagcagcagaacttcaggagaatggttgttggaaagttttcacagggaatgagttggcagctttgtttggatggtggatgtttgattgctggaagaaaaataaatcaagaaatgctgatgtgaagaacgtttatatgttagccaccacagtctcttctaaaattctgaaggcaattgcacttaaagaaggatttcattttgaagaaacattaccaggttttaaatggattggaagtaggataatagacctcctggaaaatgggaaagaagtcctttttgcatttgaagagtctattggttttctctgtggaacttcagttttggataaagatggggtgagtgcagctgttgtggttgctgagatggcatcttacctggaaaccatgaatataacattgaaacagcaactggttaaggtttatgaaaaatatggttatcatatttcaaaaacttcctatttcttgtgttatgaaccacctaccatcaaaagtatatttgaaaggcttcgtaattttgattctccaaaagaatatccaaaattttgtggaacatttgctatattgcatgtacgggacgttaccactggatatgacagtagccagcctaataagaaatcagtgctgcctgtgagtaaaaacagccaaatgattacatttacttttcaaaatggctgtgttgctacccttcggacaagtggaacagaaccaaagataaagtattatgcagagatgtgtgcgtcacctgaccagagtgacactgctttactggaggaagaactgaagaaactcattgatgctctgatagagaattttcttcagcctagtaagaatggactgatctggcgttctgtttaggggtacaccaatatgtcatgacactgtgtgggcatatggaacagagcaaccgagaactgcatacattgaaccttgtgttagcattctctctctatctcatctggccgagtatctttttccttttattttctttctttttggtcaactggctagactaaacaaagtataagtttgaaatgaaatggtctagagggaaatgattcaaattttttcataattcaaacaaaagttattacactaaaagtattatagtaacgtattgtccttccgttaacagaaacatcacaattcaaaagtgagttttcttattatagtgtgattaagcctagttctgtatctcgtaattgtgtatagcatggtaaaagaaaaaaaaaaagacaggtaaatgttatataattgtagggttagttaaggaaattagtccataaaattggcaagaaaatggtactttccttgattgttatgaaaaagtgtcattgtgacatcacaggtattaatttacaaattagagtatttgaaataggatatttagcatttctgtagtttagaacagatgttacagtgtgtggttttggcatgtctgtttcaggtgcccttggtgcagtataaatttactgtatgtatttaaaattctgatgtttactgaacataaaacaatagtggcaacactcctattggctttgttcttatcaaatttctcagtgccttctcagggtctggtatgaacagaaaaaacagtgttcctgcatttaccataatttaatcagtcaatttgcagatagctaaggaaaatcttccaaaatctgtaggtgcttcctctatatcaagtgagtttactgattttaaaatcttaggaatataaataaagatcttaataaaagcaagcttaatgtagttaaggatcttcatattagaattgtgtcatttatcaaaccttttattacagaaaaaaatctgaactgagaaaggagctctgaatttatttgacagtctaacttttgaattacatttttgtaagtagatttatcttttattttatgaagtaatgttaattttactaagaataaaacatccaaattttaagtattatgaaatactaaaactacatgttttaaaacagaggtccagtttattctaacatcttgctgacttctgtagaatttctgattgcatgactattatttatcttcttttagtgtagaaaataattttttacaaaaagtcacttttgggctgggcgcagtggctcacgcctgtaatcccagcactttgggaggctgaggcaggtggatcacaatgtcaggagtttgagactagcctggccaatatggtgaaaccctgtctctactaaaaatacaaaaattagccgggtgtggtggtgggcacctgtagtcccagctactcgggaggctgaggcaggagaattgcttgaacctaggaggctgagattgcagtgagccgaaatcacgccactacactccagcctgggcaacagagggagactccatctcaaaaaaaaaaaaagtcacttttggctaatcatgcagtcttctgaaaaggtttaataaaaaaatgctgtttaggctgggcttggtggctcacatctgtaataccagcgctttgggaggctgaggcaggaggattgcttgaggccaggagtttaagttacagaactatgatcacactgccgcactgaagcctggatgacagagtgagaccttatntcaaaaaaaaaaaaaaaaagagagagagagagaaaaagaaatgctgtgtttaatcttcttaaaatgtatcttgtcctacatagttctcagaatacatatggggtatagttaggagataacaataacaagacctaaacaaattgcttatgggagatagcactgtaattagagaatttatttcatataaaataataatataaagtttgaactgattagaatgttccttaaatcatggtttcgtttgttgcagctgtcagctaacatttggttgagctcatataatccaaacctaattgtccaactattgtattgccactattgttaatttgttccttccttactttcttattgttggatcttatatgactgtatgactgtagataatagacagctagctaaatgtagagcaccatttttctcaatgagtttgttttcaaaggctttgcactggagaagatatgtgtagaatttttgttttatttttaaaatgtgtaaaacatcttttgttttatatgcttttaagaatgtagattgtaatttaggaaatggcatatattctgcaaagtggtataatgttgtatatatgaaaaacaggtatatttggtttagttctgtgtttcagtgactgataaacaaaaatgaagctaaaatgaatcaacggctcattcatagttactaaagccatgtcatgactgtcattctattatgaagaaaacagttttatttgagtgctttaatataatgcaacatttaagtcatcttaaggtgaaaagttattgaagtgttcttctctcaagttaacaaaattttacaaatgttcctgaagtgtatcgattgagggaattattttattctagcctgtcatgagtctgtctgagcatgatacttaacatgaacttgatgtagtaggtgcacatttgcctaacaggataaattcagtgatagcccaagctggtcaggagagacagaagtgctggctaggaggtctcagcctcgggcactacaatgtttatctttttctttttgaacaatattgtgaaaatgattgcattctcattgagcatgaaagtcaaaactggaattttctaaagctttggagaaaaggagagaattagtagggcaagatcaaagcatacattggaaataaacagtagaaataagcaaacaatataaagagacacgggaaatgcttctcgtgaagggcaaatgtaacaccataacagtagggaataaactgtgtcccacctgtttacttgtgtttatttgttgttatgatgagtatgcacctaccattttcctttattgtgatcactaaaatgaggccaaggtttaggaggtgagaaaaagtatcccttttacggattcagttcctgctaggatgttgtatcagaatcatgtgagaactcaggaagaggtagagcagaaataaaaaggaagaaaatgtagattagaaaataagacttctgagaaaaagttcaaggaataaagattgtttgactctggagaggagaaagctgttgagatagtttgctaagtttgctaataaagctttattgagtcttttattgaagggttcaaagtaagaaatactatgccatagtgttctccatctctagtgaagacagaaccagagggaataaggatcttttttttaaagacagcatggaaagtttaagatttaggaacttcttgagaaatcttcataatatcttctattcaaaatcttttttttatttttaagggaataaaaattttaaaaattaagagatatacagatgactttttaaggtccttctttccagcacattttttttaaaaactcaggttagaanaaaaatgtcataaagggcactaaaagtaacatttgggtttcactccatatttagnagaatttagctcacnaaacaatttttgtgtgttttgagtaactgatgcataagtgcaatgaataattttcctgcttcactgttatttttaatttaacctggcaaattaagtgagacttgaacnaaattttgttcatcttgaagaatgtatagtggcttaggttatttgaggttttcgttttgaatatatatgttgttattttgatgtagatacgttagcagatggagaggttctaagagattggatactttggaatgtctttatataggaaatagacctcccatttcttaagcaagttgcttctggaattgatgcaacaggggatattagctgtagtttaatggataagttgttctatgagctgctgctatcagtacttttttccacattttccattgatatttgtgatgcttgaaaaatccaaacttcacttggatacatttaattttatgcctttttctctctacctcccacttttcctaggcacccttgcacattttgttactgtgaaggactattgccctgttacctcactgataagaaatctcaactgtattcattcagaatgctttaagcttagtcataaactacatttgcctatggacctttggttattttgttaatgttgtcattatatttaagacttattgtaggaagtaattttaaatctatttcataacctgttttgatctgtctgcatactgctatatgttaatttattacggcttttacaattcacttgtcatctgagattgttctagaaactgatgaggaaagagtcgtactaaccaaaatgaatgggcaattgacataacattctatttcaggtttccttgtacttggggagccaaagcacaagatctaaggaaatcttattcacatttgtccctcagagcatcttaccctaagccacagaggtataaatagtaagatgagaattgctcattgtctgactccttgcacagcatgaatttaattctagttggaaacaaagttagtgttgactactggttaccttaaagtattcaccatactatatatttattagaccatctttcctctttgtttattcaagactatgtacttataaaagagaacctataagaatgtgtagagtgaccaaatagggacaaagtgacatacctagagtttgctgctcaaatttttccactagcgtaaccctaaagcagaggggcatgatgaagggggaaggggttctgagagcaaaatcagaatcagcctaccactgacatgaagtgtgttctgtctttaaaatgtaagtgaattttgcattctctataataaaacttttaatataaaaatgatatgtttaatctttactgaaacttatgccaccacaaaggagcaccatgttcatcacgtggctgctcagttttttcccccagtgccctcaccgccagtggaggcaagtccttgagctacacacactggctgtagtgcaagatatataaacataggccgggctcggtggctcatgcctgtaatcctagcactttgggaggccgaagcaggtggatcatctgaggtcgggagattgagactagcctgaccgacatggagaaaccctgtgtccactaaaaatacaaaattagccgggtgtggtggcacatgcctgtaatcccagctactcgggaggctgaggcaggagaatcacttgaacccaggaggtggaggttgtggtgagccaagatcgcgccgttgcactccagcctgggcaacaagagtgaaactccgtctcaaaaaaaaaaaaaaaagatatataaacatagaacatatccagactatttcctgcccttggaatctgaccttcagaaggattaacgccaaactaaactgacctgaaacagttttgttactattggcattccttgactaaaaaggaccacctgatgctcagtcccgagagtaggaatcgtggtttattatttttcatatccataccacctagttcagtacctgttatagagtgtttaattgctgatactaggaattaagggattttttaaaagtagcaaatagtttaaggaacaatcaaaaaatgaattttctaattcagttttttcaatgaagtcccatcactgaactttataatgtaatgtttattaagcagacatccccttaaatactcagtttctttggagagagcaaagcatatctccctgtggaaattatatataatgcctggtattttacactcaaagcaaggtgttggccaggaaggtaaagaaatggtgtctatgtagacttaatatcactagtctaagtgtcattttgagcctagtagcactaccttccaagtgagtcacaacaaatttgatcctatttgtaggttttttccactgnnatgattcntcatgtatcttacaagagccantcaagcaagactctgcttctatgtatggtgaggccttgttgttctagggtagaataaactctttgtatgcctcattgaatatgccaggtaaaatatatgcagtcaagaatgaattatttttctgactaaagtgtgtagcagtagttcaaaattgtgcccttgttttaacagtttctgtcaacatcttctcatttttccctacaaaaacaccagggtgtattataagtactgcctgtgagaatttgcactttatgtatttgtgtgtggatttcttgtggttttagccaaatgaagtgttatcagtaataaacaggtctnttcatagg

SEQ ID NO: 416 - DNA, 1887 bp, Homo sapiens
cgcgagcggccgcggacctagccaacagcaacgccggcgccgccgtgggcaggaaggccgggccgcgcagcccgcccagcgcccccgcgccagcgccgccgccgcccgcgcccgcgccgcccacactcggcaacaaccaccaggagagccccggctggcggtgctgccgccccacgctgcgcgagaggaacgcgctcatgttcaacaacgagctcatggccgacgtgcacttcgtcgtggggcccccgggggcgaccaggacggtgcccgcccacaagtacgtcttggctgtcggcagctccgtcttctatgccatgttctacggagacctggcggaagtcaaatctgaaattcacattccagacgtggagcccgcagcctttctgatcctcttaaagtacatgtacagtgatgagatcgatctggaagccgacacggtgctggccactctgtacgctgctaagaagtacatcgtcccagcattggcaaaagcctgtgtcaactttctggagacaagtttggaagccaagaacgcctgcgtcctgctgtcccagagccggctgtttgaggagcccgagctgacgcagcgctgctgggaggtcattgacgcacaggccgagatggccctacggtccgaaggcttctgtgagatagaccggcagacgctggagatcattgtcactcgggaggccctcaacaccaaagaggcggtggtcttcgaggccgtcctgaactgggccgaggcggagtgcaagaggcaggggctgccaatcaccccacgaaacaagaggcatgttctggggcgagccctctatctggtccgaattccaaccatgaccctagaggagtttgccaacggcgctgcccagtcagacatcctgactctggaggagacccacagcatcttcctgtggtacacggccaccaacaagccccgcctggactttcccctgaccaagaggaagggcctcgccccgcagaggtgccaccgattccagtcttctgcctaccgcagcaaccagtggcggtaccgcgggcgctgcgacagcatccagtttgcagtggacagaagggtatttattgcagggctgggcctgtatggctccagctctgggaaggctgagtacagcgtgaagattgagctcaagcggctcggggtggttctggctcagaacttgaccaagttcatgtcagacggatccagtaacaccttcccggtctggtttgaacacccggtccaggttgaacaagacaccttctacacggccagtgccgtcctggacggcagcgaactcagctactttgggcaggaggggatgacggaagtgcagtgtggaaaggtggccttccagttccagtgctcctcggacagcaccaacgggactggggtccagggtgggcagatccctgagctcattttctatgcctgaggtgcccggggaggctgcagcaggtcagcgagtgagtggaggggaagtcaagatgctaactgcttcttgacaccatgaaaggctgctcttaactttgtctctctttgacatgtagtcagctgaagcttgactgtgtagagacattttccacacagccagaacccagggattggagtcttaggcatctctggtacagtggggtgcacgtctcaggtggaggaagatttacggctcaagacaggccccagatcccctcccagtggcacccatgccacctgctttgaggggttggatcttcctgctaccctcttggattctaagtggttccaagcttaacttgagaccttcccttcaaatctaaaattggcaaaaagtcacttaaaatagtggacttctgtaataaaggttgcctaaaataaaaaaaaaaaaaaaaaaaaaaaaaaaaaaaaaaaaaaaa

SEQ ID NO: 417 - DNA, 2697 bp, Homo sapiens
acgcgcctgtgttgccgcccgcggccctggcttcgggcttcagggagctctggtgcagtctccgcctgtcagtgccggcagtcgtccgcggcgcccgccccggtcccgcactggtgcagccatgtcctcttccccgtgggagcctgcgaccctgcgccgggtgttcgtggtgggggttggcatgaccaagtttgtgaagcctggagctgagaattcaagagactaccctgacttggcagaagaagcaggcaagaaggctttagctgatgcacagatcccttattcagcagtggaccaggcatgtgttggctatgtttttggtgactctacctgtgggcagagggctatctatcacagtttgggaatgactggaattcctataatcaatgtcaacaataactgtgctactggttctactgctttgtttatggcccgccagctgattcagggtggtgtggcagaatgtgtcttggctcttgggtttgagaagatgagtaagggaagccttggaataaaattttcagatagaaccattcccactgataagcatgttgacctcctgatcaataagtatggattgtctgctcacccagttgctcctcagatgtttgggtatgctggaaaagaacatatggaaaaatatggaacaaaaattgaacactttgcaaaaattggatggaaaaatcataaacattcagttaataacccgtattcccagttccaagatgaatacagtttagatgaagtgatggcatctaaagaagtttttgattttttgactatcttacaatgttgtcccacttcagatggtgctgcagcagcaattttggccagtgaagcatttgtacagaagtatggcctgcaatccaaagctgtggaaattttggcacaagaaatgatgactgatttgccaagctcgtttgaagaaaaaagcattattaaaatggttggctttgatatgagtaaagaagctgcaagaaaatgctatgagaaatctggcctgacaccaaatgatattgacgtaatagaacttcacgattgcttttctaccaacgaactccttacttatgaagcactgggactctgtccagaaggacaaggtgcaacgctggttgatagaggagataatacatatggaggaaagtgggtcataaatcctagtggtggactgatttcaaagggacacccactaggcgctacaggtcttgctcagtgtgcagaactctgctggcagctgagaggggaagccggaaagaggcaagttcctggtgcaaaggtggctctgcagcataatttaggcattggaggagctgtggttgtaacactctacaagatgggttttccggaagccgccagttcttttagaactcatcaaattgaagctgttccaaccagctctgcaagtgatggatttaaggcaaatcttgtttttaaggagattgagaagaaacttgaagaggaaggggaacagtttgtgaagaaaatcggtggtatttttgccttcaaggtgaaagatggccctgggggtaaagaggccacctgggtggtggatgtgaagaatggcaaaggatcagtgcttcctaactcagataagaaggctgactgcacaatcacaatggctgactcagacttcctggctttaatgactggtaaaatgaatcctcagtcggccttctttcaaggcaaattgaaaatcactggcaacatgggtctcgctatgaagttacaaaatcttcagcttcagccaggcaacgctaagctctgaagaactccctttggctacttttgaaaatcaagatgagatatatagatatatatccatacattttattgtcagaatttagactgaaactacacattggcaaatagcgtgggatagatttgtttcttaatgggtgtgaccaatcctgtttttcctatgctctgggtgaatagagcctgatggtatactactgctttgcggaattgcatacaactgtgcattacaaagttaatatggtaattatggtctggggtaaaattgagtttcagaataaaattaggaacagtaaaatccaaagaactatgtaaacaaaaaagcttttgttttgcttacaaagtatatttaaggattattctgctgaagattcagtttaagagttttccttgggagaactaagtaagaaacacaatgccaacagctggccagtaattagtgttgtgcacttcatgtcattaatcaatttctcaatagttcttaaaattagtgagattaaaaatctaaaaattttgcatttcatgctatcagaaacagtattttcttcccaaatcaaaataaaagaaatatgatcagagcttgaacacaggcttatttttaaaataaaaatatttttaacatgggtttccttattgaaaaatcagtgtattagtcataaaacaccatcattaagaataattgaacaataaagtttgctttcagatgcagttttcaaattataatctcatttcaatttataacgttctcagtcctttgttataattttcctttttcatgtaagtttaattatctgcatttatcttttttcctagtttttctaatactaatgttatttcttaaaattcagtgagatataggataaaataatgctttgagaagaatgtttaatagaaaattaaaataactttttctggcaaaaaaaaaaaaaaaaaaaaaaaaaa

SEQ ID NO: 418 - DNA, 4040 bp, Homo sapiens
gtcgcctctcacccgccccggccgctccagcccgaggcgccccgaccccgcgccactccgcgcccggccagccgcccgcagccatggggctcctgcccaagctcggcgtgtcccagggcagcgacacctctactagccgagccggccgctgtgcccgctcggtcttcggcaacattaaggtgtttgtgctctgccaaggcctcctgcagctctgccaactcctgtacagcgcctacttcaagagcagcctcaccaccattgagaagcgctttgggctctccagttcttcatcgggtctcatttccagcttgaatgagatcagcaatgccatcctcatcatctttgtcagctactttggcagccgggtgcaccgtccacgtctgattggcatcggaggtctcttcctggctgcaggtgccttcatcctcaccctcccacacttcctctccgagccctaccagtacaccttggccagcactgggaacaacagccgcttgcaggccgagctctgccagaagcattggcaggacctgcctcccagtaagtgccacagcaccacccagaacccccagaaggagaccagcagcatgtggggcctgatggtggttgcccagctgctggctggcatcgggacagtgcctattcagccatttgggatctcctatgtggatgacttctcagagcccagcaactcgcccctgtacatctccatcttatttgccatctctgtatttggaccggctttcgggtacctgctgggctctatcatgctgcagatctttgtggactatggcagggtcaacacagctgcagttaacttggtcccgggtgacccccgatggattggagcctggtggctaggcctgctcatttcttcagctttattggttctcacctctttccccttttttttcttccctcgagcaatgcccataggagcaaagagggctcctgccacagcagatgaagcaaggaagttggaggaggccaagtcaagaggctccctggtggatttcattaaacggtttccatgcatctttctgaggctcctgatgaactcactcttcgtcctggtggtcctggcccagtgcaccttctcctccgtcattgctggcctctccaccttcctcaacaagttcctggagaagcagtatggcacctcagcagcctatgccaacttcctcattggtgctgtgaacctccctgctgcagccttggggatgctgtttggaggaatcctcatgaagcgctttgttttctctctacaaaccattccccgcatagctaccaccatcatcaccatctccatgatcctttgtgttcctttgttcttcatgggatgctccaccccaactgtggccgaagtctacccccctagcacatcaagttctatacatccgcagtctcctgcctgccgcagggactgctcgtgcccagattctatcttccacccggtctgtggagacaatggaatcgagtacctctccccttgccatgccggctgcagcaacatcaacatgagctctgcaacctccaagcaactgatctatttgaactgcagctgtgtgaccgggggatccgcttcagcaaagacaggatcgtgccctgtcccctgtgcccacttcctgctcccggccatcttcctcatctccttcgtgtccctgatagcctgcatctcccacaaccccctctacatgatggttctgcgtgtggtgaaccaggaggaaaagtcatttgccatcggggtgcagttcttgttgatgcgcttgctggcctggctgccatctccagccctctatggcctcaccattgaccactcctgcatccggtggaactcgctgtgcttggggaggcgaggggcctgcgcctactatgacaacgatgctctccgagacaggtacctgggcctgcagatgggctacaaggcgctgggcatgctgctgctttgcttcatcagctggagggtgaagaagaacaaggagtacaacgtgcagaaggcggcaggcctcatctgaccccaccctgggccactgcctgctccagagagtggaccttgactcttccacacctgcctatactcactaatgttaacacgtcatttcctttttgtatttttaaacaagaaagaaaaccccagtcctcatttgccttccctacctcttcctcccagagtcctccccacagttcctaagggccactgtgtacccgggctgtgtgggccagaactggggggctgagtcttccctggccccttggaagaggcccccagatgcccaggctcacttcagtgttgagtcctccattgaggatgcccactgaggcagccaggcccctcaccagccctggggggaatcctaaacagagagagaaaaagggtatctgcccttcttgccaggcagctccactctcccgctgactgcccacaccctgcagagtggcaggggtgaaaggaagaaggaagtggctgagttattaatagccagagccactgggagactggggagactggctgtaacccccttcacacctgggtttggcatcagcacagactacgggaggggctggctccctccccctcagaccctcacttcctgtacctagaggccattctggatgctgccatgttgggaagtacagtctctgcccattacctgcatgcaggcaccagagcagggactgagaaaccccaaggatgggtcatctaagtgctgtccatatgaaccctggactttctgtccttagatcctcacatgttatccctgtctttctggggtacgtttcaaactgaggaagctacaacacagtgaagacccaaggaaggcctatgaaatggtcctgatgcccaacctcccaccccttcaatgtggggacgagaccccctcatctcagagtaatgggaagaacctcccacatctccctggcagcagatgaggtggcttcacatgcacttccctgtctggacttcagcccgtattccgaggagtagagaggcagaagagatgtcagcaaagcaagtgatgaagcagagtggatgtccactgtcaccaagctggatggcaagctgcggcccacaaaacagccagtcaggttggctttcctggtttcagacatgctcataccattcccattttctcagcctcttctctgcctccagagaggtggatgcctgggttgagagacacagctgctacgtgatagatgttgagagacagaagccaacgaaggaggtcattcatcaacaaatatatttattggagaccgactttgtgcaaagcaatgctaatcagggttctccatggagcttccctcagctcttacctcacctccctccatttacattagggccttctcccagggtgtgctcggtgggcagtgtgggactgggggtgtgggagttggtgagagcaggaggagaggtggggacagcaagaagccacagattggcatgaaggatcctgacctgactatccatgccatccatggcccccagactgactctgcacctggccctttgccagacagctctgtctccccatgtcctctggaacagctgggcatgggtcatggccattcatgacccttaagtgccacccttcttggaagaccccctccagaagcatactggaagccacctctggaaaagcctcatatggtgatatgccaaaatatttatgtcaatgtccaaacaaagtccaatgccatgagactgaagtctttgtggaaaccactgttacagacaagcttatttccaaagccacctcatttccaaacatctcactcaggaagggaggctcaatgtaacctcaggggccagttttagcatttgaaatggttctgcttggaaaatgatgccctgcaactaaccctggtctttcccatggcaatttaaccacatttggaaggcactgccttcagctgagtttatgaacaatgaatgccaaccttcaggttctagaagattggttgcactcccaaacctttattctattatattactattaaaatattctaattttgctattgaggtaaaaaaaaaaaaa

SEQ ID NO: 419 - DNA, 6364 bp, Homo sapiens
ctgggatagaagcggcaggagcagcgttggcaccggcgaaccatggctgggattttctatttcgccctattttcgtgtctcttcgggatttgcgacgctgtcacaggttccagggtataccccgcgaatgaagttaccttattggattccagatctgttcagggagaacttgggtggatagcaagccctctggaaggagggtgggaggaagtgagtatcatggatgaaaaaaatacaccaatccgaacctaccaagtgtgcaatgtgatggaacccagccagaataactggctacgaactgattggatcacccgagaaggggctcagagggtgtatattgagattaaattcaccttgagggactgcaatagtcttccgggcgtcatggggacttgcaaggagacgtttaacctgtactactatgaatcagacaacgacaaagagcgtttcatcagagagaaccagtttgtcaaaattgacaccattgctgctgatgagagcttcacccaagtggacattggtgacagaatcatgaagctgaacaccgagatccgggatgtagggccattaagcaaaaaggggttttacctggcttttcaggatgtgggggcctgcatcgccctggtatcagtccgtgtgttctataaaaagtgtccactcacagtccgcaatctggcccagtttcctgacaccatcacaggggctgatacgtcttccctggtggaagttcgaggctcctgtgtcaacaactcagaagagaaagatgtgccaaaaatgtactgtggggcagatggtgaatggctggtacccattggcaactgcctatgcaacgctgggcatgaggagcggagcggagaatgccaagcttgcaaaattggatattacaaggctctctccacggatgccacctgtgccaagtgcccaccccacagctactctgtctgggaaggagccacctcgtgcacctgtgaccgaggctttttcagagctgacaacgatgctgcctctatgccctgcacccgtccaccatctgctcccctgaacttgatttcaaatgtcaacgagacatctgtgaacttggaatggagtagccctcagaatacaggtggccgccaggacatttcctataatgtggtatgcaagaaatgtggagctggtgaccccagcaagtgccgaccctgtggaagtggggtccactacaccccacagcagaatggcttgaagaccaccaaagtctccatcactgacctcctagctcataccaattacacctttgaaatctgggctgtgaatggagtgtccaaatataaccctaacccagaccaatcagtttctgtcactgtgaccaccaaccaagcagcaccatcatccattgctttggtccaggctaaagaagtcacaagatacagtgtggcactggcttggctggaaccagatcggcccaatggggtaatcctggaatatgaagtcaagtattatgagaaggatcagaatgagcgaagctatcgtatagttcggacagctgccaggaacacagatatcaaaggcctgaaccctctcacttcctatgttttccacgtgcgagccaggacagcagctggctatggagacttcagtgagcccttggaggttacaaccaacacagtgccttcccggatcattggagatggggctaactccacagtccttctggtctctgtctcgggcagtgtggtgctggtggtaattctcattgcagcttttgtcatcagccggagacggagtaaatacagtaaagccaaacaagaagcggatgaagagaaacatttgaatcaaggtgtaagaacatatgtggacccctttacgtacgaagatcccaaccaagcagtgcgagagtttgccaaagaaattgacgcatcctgcattaagattgaaaaagttataggagttggtgaatttggtgaggtatgcagtgggcgtctcaaagtgcctggcaagagagagatctgtgtggctatcaagactctgaaagctggttatacagacaaacagaggagagacttcctgagtgaggccagcatcatgggacagtttgaccatccgaacatcattcacttggaaggcgtggtcactaaatgtaaaccagtaatgatcataacagagtacatggagaatggctccttggatgcattcctcaggaaaaatgatggcagatttacagtcattcagctggtgggcatgcttcgtggcattgggtctgggatgaagtatttatctgatatgagctatgtgcatcgtgatctggccgcacggaacatcctggtgaacagcaacttggtctgcaaagtgtctgattttggcatgtcccgagtgcttgaggatgatccggaagcagcttacaccaccaggggtggcaagattcctatccggtggactgcgccagaagcaattgcctatcgtaaattcacatcagcaagtgatgtatggagctatggaatcgttatgtgggaagtgatgtcgtacggggagaggccctattgggatatgtccaatcaagatgtgattaaagccattgaggaaggctatcggttaccccctccaatggactgccccattgcgctccaccagctgatgctagactgctggcagaaggagaggagcgacaggcctaaatttgggcagattgtcaacatgttggacaaactcatccgcaaccccaacagcttgaagaggacagggacggagagctccagacctaacactgccttgttggatccaagctcccctgaattctctgctgtggtatcagtgggcgattggctccaggccattaaaatggaccggtataaggataacttcacagctgctggttataccacactagaggctgtggtgcacgtgaaccaggaggacctggcaagaattggtatcacagccatcacgcaccagaataagattttgagcagtgtccaggcaatgcgaacccaaatgcagcagatgcacggcagaatggttcccgtctgagccagtactgaataaactcaaaactcttgaaattagtttacctcatccatgcactttaattgaagaactgcactttttttacttcgtcttcgccctctgaaattaaagaaatgaaaaaaaaaaacaatatctgcagcgttgcttggtgcacagattgctgaaactgtggggcttacagaaatgactgccggtcatttgaatgagacctggaacaaatcgtttctcagaagtacttttctgttcatcaccagtctgtaaaatacatgtacctatagaaatagaacactgcctctgagttttgatgctgtatttgctgccagacactgagcttctgagacatccctgattctctctccatttggaattacaaccattgtattttgtttgtggcataaattacagtcatctgtctttcactggaatgaagaccatgcctaggaacattttttaaggactcagctgtggcttttagggcttggttcataccatgggggaaaaaaaagtcctaggagaaagcgacgtggctcattagtgttgcctcttcagtgctcaagccgcctggtggattcctatgacacagggggcctggaaagaaagggaaagtggatttaaaatatatatatacgtaacccaagccccataacccctaactggacaaatgaggtctgtttctttgggcctgaggctgtgccatataaagtcttattttgggactttacaaacttgtcctaactatcttgtggatagtgggctgtgacaatctggaatagagaacgttcacacttcgctcctttaaagaagcgaccccagatctgcaagggagtagattctgctatcttggcctcacagcccttcctgttgattacaaagcccgtggaagaaaacagaacacaccctcctcagttccgtctaaatgtgtttcttctgcttcaattacaccagttctggggcaaagacactgatgaaacaacacccatacctgaaaagaataaatgtgtgactttcaaatcccctttcgcagtgaaagaaacagcaaacacttaagattcagcatctgttctccagttgcactgaggaatgcactgtctcgcagcaccagctctgcagagcccttgccccagactctttgcggttttatttatatgtatttccatatttcattcctgtgtgtcactgctgcattggtgtggcagcaagtgaccaaatgctacaggtcttactatggacaccaggtcaggtgcaaccacacaaaacaaagccagttccatgagctgcctatgatatgcattgcggaagtaacattttacccagggtgtgccattgcagtgatataaatatatttttttcttagactaaatatgagctgactatctcttttgatgtgtgtacataggtgtgagtgtgtgtgtatgcgtgcctgtctgtgtgcgggtgtgtgtatgtgcatagcctcatgcttaggactacccatgaatgttgtggaatgctacacctggagagttctggttttccaccagtttcaagatgaagaactacatgatacagtggacctggagaccatccccttggaaagacaacccagagatgttcagcatcctgtatctacacgcatcctgtatctacacgtgtattttgtagctgtcacactaaccttaataagaattctacagctttggacagaggcattttcaccttaatggtgaagtaatttaaaatataaatccattcaggtgacaacccatcatcaaaattacaaattttctgattgaactcatctgaatcatcagttccttgatggagagagagaaggagatggaatgtgtctggtaaccccaaatggagtacaagtagcctttgttttcctgcataaatggacttgttgaatgcgaacgaatatatgcaattcatatacttttggagatgaacgtagatatgtgtgtcagctttgagatggtgtgtcctggattaatactttgtctcccaatatcacagaaaaatacatgccagtgactcttgaggttaaggtagttgggatgaaatggcctcaggcaatttcacattccctaattacctggaaagttctacagtaattaatatgcagctaactcctgttgccctcacaagagcatcagccttctagaatcggagctccggagtgtgaagattcagtattgatatgatatgtataccaaactccagccaacttactgccatttttcataatctgagtggctgccttgcttatcctaagctgtggttgcagaaaccgtggccatttatataagctataacatcaaatcagggaaaaatgaggaaaaaaaatagattctgaaccatttattgttgaataagtagagaaaatcatcaataaatatttattacattctgacagggtgtgtggcattgtgttctatgccagagtgacaaagttgattcacccctttttggggaccttaatatattttttaagggatgtgcctatgcattgatgcctgaaaaatatgtataaagaaatgaggttgactcttctgagcagttcatcttttccagaggtaagggtaggaggccaacttcagggtctgggtctgagcccgtgggcaagccctggccgagtgagctccaatgctaactcatgtgccgatctctagagcagtgggaaactaccccgctgcaccaaatcaagtagcttcaccttgtgtatgcaggccccaagttattttttagcaatcttacgagtgaaatgttctggtgggttgaaaaacgttcttattttaaagaaaggttgtgctcgctacactgctggtgtgtgcattctgagacctcttgtattcaatctgtgaaggatatgtgtattaatccgtacacccgtatagcctcaatatttgtctgaagacacttaaattctgacccataaaggaaagttctagaagcaatattttcacttatttaacattctccaaacaacatcaagcattgatacacactgaagagtgcgtttattttttgtatcactctaagtatgttggaatatgcaaggactgtggttcaaattagaatgtataaggcatattataatttagttcatactgaataagaaattaacagaacattgttcggttcacacgttccaaactttgagtgatttctggagttagacatagattttctattttgttttaatttgtcaaggtatttttcttcccttcatgaactttaggtacacataacttatgtcatttatttatggtcttttatacctagtttgtaaaattgtaaaatagcaaactaaatgcaaagagtttgcatttgaaaataataaagtagttgccgtatacaaccctgcaaaaaaaaaaaaaaaaaa

SEQ ID NO: 420 - DNA, 1276 bp, Homo sapiens
tgagatcacttcccttgcacagtttggaagggagagcactttattacagaccttggaagcaagaggattgcattcagcctagttcctggttgctggccaaagggatcatggacattgaagcatattttgaaagaattggctataagaactctaggaacaaattggacttggaaacattaactgacattcttgagcaccagatccgggctgttccctttgagaaccttaacatgcattgtgggcaagccatggagttgggcttagaggctatttttgatcacattgtaagaagaaaccggggtgggtggtgtctccaggtcaatcaacttctgtactgggctctgaccacaatcggttttcagaccacaatgttaggagggtatttttacatccctccagttaacaaatacagcactggcatggttcaccttctcctgcaggtgaccattgacggcaggaattacattgtcgatgctgggtctggaagctcctcccagatgtggcagcctctagaattaatttctgggaaggatcagcctcaggtgccttgcattttctgcttgacagaagagagaggaatctggtacctggaccaaatcaggagagagcagtatattacaaacaaagaatttcttaattctcatctcctgccaaagaagaaacaccaaaaaatatacttatttacgcttgaacctcgaacaattgaagattttgagtctatgaatacatacctgcagacgtctccaacatcttcatttataaccacatcattttgttccttgcagaccccagaaggggtttactgtttggtgggcttcatcctcacctatagaaaattcaattataaagacaatacagatctggtcgagtttaaaactctcactgaggaagaggttgaagaagtgctgaaaaatatatttaagatttccttggggagaaatctcgtgcccaaacctggtgatggatcccttactatttagaataaggaacaaaataaacccttgtgtatgtatcacccaactcactaattatcaacttatgtgctatcagatatcctctctaccctcacgttattttgaagaaaatcctaaacatcaaatactttcatccataaaaatgtcagcatttattaaaaaacaataactttttaaagaaacataaggacacattttcaaattaataaaaataaaggcattttaaggatggcctgtgattatcttgggaagcagagtgattcatgctagaaaacatttaatattgatttattgttgaattc

SEQ ID NO: 421 - DNA, 4734 bp, Homo sapiens
tccggaggcgagccgagcgcggtggtgaggccgcctcagcgaaaaaaatgtccgcctgaagagacccacaagttctattcggggggaccgacagcccgccccgggaggaaggggcggccaggcccgaaagccgcctccccctcccagacccgagagctcgtgcggggcaaagtgaaccgagccgctgggcggtgcaaggggaagcccaagcccgttctcccggccaaagtgaactttaatcggggtggttggatgcggagacggggcggcaggacctgctagaagtggccgaagatgaatccccagcaacaacgcatggccgctatagggaccgacaaggagctgagcgacctactggacttcagtgcgatgttttccccacctgttaatagtgggaaaactagaccaactacactgggaagcagtcaattcagtggatcaggtattgatgaaagaggaggtacaacatcttggggaacaagtggtcaaccaagtccttcctatgattcatctagaggttttacagacagccctcattacagtgatcacttgaatgacagtcgattaggagcccatgaaggcttgtccccaacacctttcatgaactcaaatctgatgggaaaaacatcagagagaggctcattttccctgtacagcagagatactggattaccaggctgtcaatctagtctcctgagacaagatctggggcttgggagcccagcacagctatcttcttcaggaaaacctgggacagcatactattcattctctgctacaagttccaggaggagaccactccatgactctgcagcgcttgatcccttgcaagcaaaaaaagtcagaaaggtgcctcctggtttgccttcttctgtatatgcaccatccccaaattcagatgatttcaaccgtgaatctcctagttatccatctcctaagccaccaaccagtatgttcgctagcactttctttatgcaagatgggacccacaattcttctgacctttggagttcatcaaatgggatgagccagcctggttttggtggaattctggggacctccacttcccacatgtctcaatccagtagttatggcaaccttcattcacatgaccgcttgagttatcctccacactcagtttcaccaacagacataaacacgagtcttccaccaatgtccagctttcatcgcggcagtaccagcagttcaccttacgttgctgcctcacacactcctcccatcaatggatcagacagcattctaggaaccagagggaatgctgctggaagctcacagacaggtgatgcacttggaaaggctttggcatctatttattctcctgaccataccagcagtagttttccgtcaaatccatcaacaccagttggatcaccttcacctctcacaggtaccagtcagtggccaagacctggagggcaagcaccttcatccccaagctatgaaaactcactccactccctgcagtctcgaatggaggatcgtttagacagactggatgatgcaatccatgtgctgcggaaccatgctgtgggaccttccaccagtttgcctgctggtcacagtgatatacatagtttattgggaccatcccataatgcaccaattggaagcctcaattcaaactatggaggatcaagccttgttgcaagcagtcgatcagcttcaatggttggaactcatcgggaagactctgtcagtctcaatggcaatcattcagtcctgtctagtacagtcactacttcaagcacagacctgaaccataaaacacaagaaaattatagaggtggcttgcaaagtcagtctggaactgttgttacaacagaaatcaagactgaaaacaaagaaaaggatgaaaaccttcatgaacctccttcatcagatgacatgaagtcagatgatgaatcctcccaaaaagatatcaaggtttcatctagaggcagaacaagcagtactaatgaagatgaggatttgaaccctgaacagaagatagaaagggagaaggagaggcggatggctaacaatgccagagaacgcttacgcgtgcgggatattaatgaagcattcaaagagcttggccgaatgtgtcagcttcacttgaagagtgaaaaaccccaaacaaaactccttattcttcatcaagccgtggcagtcatccttagtctagaacagcaagtcagagagaggaaccttaaccccaaagcagcctgccttaagagaagggaagaagaaaaagtttctgccgtatcggcagagccgccaaccacactgccaggaacccatcctgggcttagtgaaactaccaaccctatgggtcatatgtaaacatcagccagttccagagttatcagtaggctagatagaaggtgacctctcctcataaggacttggacaactcagattatctgaagacacaaacctgacaggagggagaagaaaaaacaaaacacttgaaccaagaaactcaaatgtaatcctacgatcaaagcaactggtcaacacttccatcagaagtgaagataggaagctcatcagatagaacatcagcccatgagatgtttgcaacaaatcttttgttgcaagcagtgtgtcgcttctgcacaatcagagactgtctcgatctctccactcaccgtggaagttgccttgtgcctaaactgaattgacaaatgcattgtaactacaaattttatttattgttatgaaactgtaaggtctacatataaagggaaaaagttaatgtggaaagctgatctacactcagctgatgccagcatacattaaagcggttcacgtgcagagaacaaagcagtgacaaccattggcccttagcattcccggcatacctattagtgtcttaaaaaggaagggaaaagtcttttgttgccctctcctatcctcttgccatatgaatagcgttttccatgaaataggaaaatattacttggtatagcatttctcttgctctcattttttgatttatttttattttctctttgtgggtgttatatttgatctctaaatctgaacagtttatggtcacagtccagcctcctccgtgcagccctgtgtgctttgcacatttaccttacagtggtaagcagagaccatctgtgaccatagcctagctagcattttaaaaggggaaattttgttctctaggttttcccccaaataaacattgctttatttctaataataaccaagacttttcaagcttctagatctcataggaaagcttgtaatagcaaaattgtaaattacaagggaagaatctactttttagaaatcgctttgttttccaagcagtaagtactacatacagtacttgtaaagtgttagctgtaagtaagcacaaaatacatttaaaatacaaagacgattttttcaggctgtgattatggtgaacataacaaaacccagtagtcaccaaggcaggtagtgtgataaatgaacacaccactctgaggctaattacctaatggaatacaagagcaatggtcacccgtatttccttatcctagcctttatttctctgtcatttggatggctggtcaatggggaagaattgagtgggtgatttaatcaactgcaaaccatctgcccctgtcccaaaatgatgagccagattagcattaaaccagtacttgtcagtccatcttaatactgttcattaaggcactctctgtctctaatccttaggagttgttttaaaagacataatcactttgaacttccatgaaacctgtcttccaccacaacaaccctgggagagaaaaacatgctaaaggaggtatcttggcttaataattccttatagccaatatcaacagtggcaatcagcacacagaggaaaggacccaaatcactatgtagcttaaagatttctgttaatttgaaagaacaaaaacaagacagaacttctggtactctaatcaggatgattcctaacaagtcagtcatttgtgaacttagtggactttttggttactttaatttgcatatattctccagttacatcggactctatctgtggccttgttcttcatttcagtgttaatcagctaaacagaagttgttgcttatgatgtgtgagtgaacatatgccactgcctggcctttttttcttcagagcttgttgtctttttcgctatattagactttgcagtatgcccagaagctttccttcataaaatagaaagaaaaaaacatttggcttatttttcactgtagctagtcttttatacaataatcttgtaagaaaatttcttgaattctaaatattactctttctagatttttgaaatcaaaaagttttcagtaaaaagtttcttactttattttattatattaggtagtaaaaaatgtagggttatttaccataacctgttcattaatatcagaaatttacaatagcattttaagaccatagtaggattctagcataccgtgtagtacctatggagtattgtaagagctaattgttggagatgaattgcttctcatcttgttctccagtttccattgttggtttattgcagatttgtatcctgtgtcaaattcaaggtattattgataaaccttttcaaccagcagcaagaagttcaaatttttttctgtcactgtaacagaaaacacaatatgtatataacatttatgtagcaataaatgtgccatcttttttttaacacagtaaaaaaaaaaaaaaaaaaaaaa

SEQ ID NO: 422 - DNA, 2597 bp, Homo sapiens
gcggttcttaagtgttcacacaagagttaaccagcctggcatgctctgcagtttccagatcccagaggcctggtcctgtgcgtggtccctcaacacccgggcatatcactgctttagtgcaggcttgtctcagcaggtcctgttgaccagcgtggcgacgggacaccagcagtcatttgataccagcagtgatgtcttggcccagcagtttgctagtacggctcctttgctgtttaatggctgtcgctccggggagatctttgccattgatctgcgttgtagaaatcgaggcaaggggtggagggccactcgcctgttccatgactcagcagtgacctctgtgcaaatcctccaagaagagcaatgcctgatggcatcagacatgactggaaagatcaagctgtgggatctgagggccactaaatgtgtaaggcagtacgaaggtcacgtgaatgagtccgcctatctgcccctgcatgtgcacgaggaagagggaatcgtggtggcagtgggccaggactgctacacgagaatctggagcctccatgatgcccacctgctcagaaccatcccttccccgtactctgcctccgaggacgacattcccagcgtggccttcgcttctcggctcgggggcatccggggagcagcaccagggctgctcatggctgtccggcaggacctttattgtttccccttcagctaattctgcaggtggcagcgcggccgaatgtggatttgacttaaggaagttaagagtatcttattaccgtttctgtgagagcattttaagagacgtgttgtatgtagatcgcatctatccggctgccaggggtaaggtgttaagagttttatgtggagacgttcttgtaaagttatttcagttaaactgtggacttaacttgaaagtccttttcataaaaggtacctgtttcctcttgttgaatgccttagaacagttaaccacctccccaaccctttttttttttaaataattaagacttttctaaggactgaagattggcaaaaactaaaataaattaaagcagcttctttcactagtagccctttagagaagcataatgatggtactggtaagactgtttgactaatcatacagggtcccaggcatctgcgcttgaggaagccagtgggagtggagacaagggagaggtaatttctcggagtctctacagaaatatttaaggctggagtttggaatcattaaatttggccttctcaaactcaatagcagatctcttaaggttctccttttattgttatcatccataggcattggaaggaaagatggatctttttaaatactagaagttttaaacagtccttgatgtgcttttgttgaggtacctttcagaatgtaaggtacagcagcttcggtttctattatggtgacttgaagttcagattcaaggaattggctttgactttttgtaatctaggagcagcagtttgtgagagatttattaaaaatgttaaagagcctgtttttctactaagcaaggaagaaaaaaaacgtgtaataaggttagttgctacttcttaatagccaaagcctggaaatgatctgaatttcgaaaatgctaaaattcgtgatataatcatacaatcggatactgcataataatagaaaataaggcacacttgctatgtgaaacagtatggaccaatctcaacatgttgactgaaattaggtagaaatgagtacaaactgtatgattcaattctaaagttcaaaagcagtaaaaacttgtctatggtgattaaaggtagagtagtacgtacctctgtagaaagaaaggatttttttttctttttctttttaggatgtttgagaagtgacatggggaagctttaggaatgctgagttttctttatcttgacacttgatacatacgtaattcatatatctatatgcttcacgtttttatagtttactgtatatatgttattcctcaaaaataaaaataagcaattaggacactattgtagttaggcaagggacaatgatgccttggacctgcatgtgtgagaagtagaaatgatcagaaatgattgcattggaagatcattcgaaggtagtattattgataaggcttgctgatgagagtaaactagaaagtgaaagaaaaaaggatggcagctttttttttttttttttttgagacggagtctccagcctgggcaatgactccgtctcaaaaaaaaaaaaaaaaaaaaaaaactaaccacagctactatttatgaactctagtgccacaccccatttcttcccaggtttcaccccctcttcccaggtttcacccaccccaaccagtgttgtttgcaacacttcagcttctctcctcacgaagcacgtctccagagacgcctcttccgcaacttcccagggaagccatttctgcctggacccaccacagctcccaacctgtcacgcacccctggagggttttgctctgtaatcctgatttagaaatcctcttatatgaaaccactgtaatccacatctggttagacaattggaaaagttcattgaaaggagaaataataaaaatggcatccatcccttaaaaaaaaaa

SEQ ID NO: 423 - DNA, 1126 bp, Homo sapiens
agccgagacggtgcagggccggagaagcaccttcactcccagcctgcgccccgatgctgcgcgttctgtgcctcctgcgcccctggaggccccttcgggcccgcggctgcgcttccgacggggcggccgggggctcagagatccaagtgcgcgccctggcgggtccggaccaagggatcactgagattctgatgaacagaccttctgcccgcaatgccttggggaatgtcttcgtcagtgagctgctggaaactctggcccagctgcgggaggaccggcaagtgcgtgtcctgctcttcagaagtggagtgaagggcgcgttctgtgcaggtgcagacctgaaggagcgggaacagatgagtgaagcagaggtgggggtgtttgtccagcgactccggggcctgatgaatgacatcgcttcctcggcagtcatgggactgattgagaccacgcgagggctcctcccgggggcaggagggactcagaggctgccccgttgtctgggggtggccctggcgaaggagctcatcttcacgggccgacgactgagtggaactgaggcccacgtactggggctggtgaatcacgctgtggcccagaacgaggagggggacgccgcctaccagcgggcacgagcactggcccaggagatcctgccccaggcccccattgccgtgcggctgggcaaagtagccattaaccgaggaacggaggtggacattgcatctgggatggccattgaagggatgtgctatgcccagaatattccaacccgggaccggctagagggcatggcagccttcagggagaagcggactcccaaatttgttggcaaatgacccccattttaaccttcagcatgggagatgcatgccctgaagagcaggatccagaaggaagatttgtggccagattgccttcatcatttcacctctccagacttccatttcttcacaaggatgatgatggaaataaaatgactggcgtgatgcctggaaccaaggtgctgatcctaccacctactgctaccttccttagcttcaccctggctagaaataatcacgagggttgggtttgctttggaaaatgcctgtctctctacttgaatgataaagaattaaattag

SEQ ID NO: 424 - DNA, 6127 bp, Homo sapiens
agagagaggagagggagaaggagagaggggcagaggggaagggagagagggagagcacgcgagacggaaaggagcgcctcagagtctctgaagcacgcaagagataaccgattaggaatttttcgggcaactgtcacccggatagctgtcagagaatcatcatcaccgcaactctgacgtttcctacaagaagttagagacttaagcagtattggcatcggatggaaatggtatgcatgctgctgtggaaaatatccctgagctgaagaagtgcaactatgtgttgtgtgtgctaaatgcccagaagaacccagacccagtgggtaagagagacgaaatgtggagagaatgactaacgacaaatccgtgaatttgttctctggagttgctaatttgccagcccgaagcaacacattttacaaggaggaaacattttgctgcttctgatttctccccaaactggtgctaccagatgcatggctttctatgtgttggaacaaatcattcctaactgcagcatactgggaaaggggaaaggttgaggcaactaaccggctgtctccaaataagtgatgagatataatgcatcctccagtccatgcacgcttcctcttgcaatttgtgcatcattcctcagtggaaacctttaaaccctaaaatccaggaaaagaaaataaatacattatcatggacctgagggatttttacctgttggctgctctgattgcctgtttaaggctggattccgcaatagctcaagaacttatttacactattagagaggaattgcctgaaaatgtgcccataggaaacataccaaaggatctgaacatttctcacatcaatgctgccacagggaccagcgccagccttgtctacagactggtttctaaagctggggatgcccctttggtgaaagtatccagcagcactggggaaattttcacaacctccaacagaatagacagagaaaaactctgtgctggcgcctcatatgctgaggagaatgagtgtttctttgaacttgaggtggtgatcctccccaatgatttcttcaggctgatcaaaataaaaataattgtcaaggataccaatgataatgcccccatgtttccatctcctgtcatcaatatttccattccagaaaacactttgatcaacagccgctttccaattccatcagcaacagatcctgacacaggcttcaatggtgtacagcattatgaattgttaaatgggcagagtgtttttggactggatatcgtggaaactccagagggagagaagtggccacaactgattgttcagcaaaacttggatagagaacagaaagatacctatgtgatgaaaatcaaagtagaggatggaggcactccacagaaatccagtacggccatactgcaggtcacagtaagtgatgtaaatgacaacaggccagtgtttaaagagggtcaagtggaggtgcatattccagagaatgctcccgtaggtacctctgtaattcagctccatgccactgatgcagatataggcagtaatgctgaaatccggtacatttttggtgcccaggtcgcccctgcaaccaaaagactctttgctttaaataatactactgggctgattacagttcagaggtccttagatagagaggagacagccattcacaaagtgacagtgctggctagtgacggcagctccactcctgctcgagcaacggttaccatcaatgtcaccgatgtaaatgataaccctcctaatatagacctcaggtacattataagtcccatcaatggcaccgtgtatttatctgagaaagatcctgtcaatacaaagattgccctaattacagtttcagataaggacacagatgtgaatggcaaagtgatctgttttattgaaagagaggtcccatttcatttgaaggcggtatatgacaaccaatatttgttagagacctcttctttgttggactatgagggcaccaaagaattcagctttaaaattgttgcctctgattctgggaagcccagtttaaatcagactgccctggtaagggttaagcttgaggatgaaaatgacaacccaccaattttcaaccagcctgtaattgagctgtcagtttctgaaaacaaccgacgtgggttatacttaacaactattagtgccacagatgaagacagtgggaaaaatgcagacattgtttatcagcttggaccgaatgcctccttctttgatctggaccgaaaaacaggagttttgacagcctccagagtatttgacagagaagaacaagaacgattcatttttacagtaactgccagggacaatgggacccctcccctccaaagccaagcggctgtgattgttactgttctggatgagaatgacaatagccccaagtttactcataatcattttcaattttttgtgtctgagaatctgccaaagtatagtactgtgggggtaatcacagtgacagatgcagatgctggagagaataaagctgtgactctttccattctaaatgacaatgataattttgtgttggatccctattctggagtcataaagtcaaatgtctcatttgatagagagcagcagagttcctacacttttgatgtcaaagccactgatggaggacaaccacctcgttcctctactgcaaaagtaactatcaacgtcatggatgtcaatgacaacagcccagttgtcatttctccaccgtctaatacttcctttaagttggtgcccctctcagccattcctggctccgtggtagcagaagtttttgcagtggatgttgacactggaatgaacgctgaactaaagtatactatagtgagtggaaacaataaaggcttattccggattgatccagtaacaggtaacattactctggaagaaaaaccagcacctactgatgtgggattgcatcgtttggtggtcaacataagtgacctggggtaccctaagtctttgcacacgcttgtgcttgtattcctttatgttaacgacactgctggaaatgcctcctatatctatgacttgatccgcaggactatggagaccccgttggacaggaacataggggatagtagccaaccctatcaaaatgaggactatctaaccatcatgattgccatcatcgccggtgccatggtggtcattgttgtgatcttcgtcaccgttctggtgcgctgtcgccatgcatcaaggttcaaagcagctcagaggagcaagcaaggtgccgaatggatgtccccaaaccaggagaacaagcaaaacaagaaaaagaaaagaaagaaaaggaagtctcccaaaagctctcttttgaactttgttactatcgaagagtccaaacccgatgatgcagttcatgaacctatcaatgggacaataagcctgccggctgaactggaggagcaaagtataggaagatttgactggggcccggcacctccaacaacattcaagcctaacagtcctgacctggccaagcactacaaatctgcttctccacagcctgcttttcatctcaaaccagacactccagtttccgtgaaaaagcaccacgtgattcaggaactccctttggacaacacctttgttgggggttgtgacaccctttctaaacgctcttccactagttcagatcacttcagtgcctcagagtgcagttcccaaggaggcttcaagacaaagggccccttacacaccagacagtcgcagcgccgtgttacgtttcatctccctgatggctcccaggaaagctgcagtgacagtggtctaggagaccatgagccggtgggtagtggaaccctgatctcacaccctcttcctctggttcagccacaggacgaattctatgaccaggcctctccggacaagaggactgaagcagatggcaactctgatcccaactctgatgggcctttgggtccccgaggattagctgaagctacagagatgtgcactcaagagtgcttggttttgggtcactctgataattgctggatgcctcctggcttgggtccatatcaacaccccaaatctcctctctcaacctttgcaccccagaaagaatgggtgaagaaggacaagcttgtgaatgggcacaccctgaccagagcctggaaagaagacagcaacaggaaccagttcaatgaccgtaagcagtatggctccaatgaaggccatttcaacaatggcagccacatgacagacattcctctggcaaatctgaagtcttataagcaagcaggaggtgctactgagagtcctaaggagcaccaactctaagaaaaggctatatgggacctaataactttaaatagacatgctaataccgtgtgcgtcagagctttatgtattcaatagatctctacaactatgccccttctagcagggatacctataactttgtgttagcaccatggagaatacaatgtttttgcaacatatgagagaagatagttctagccatgcaattttgtttactagaattgattacactctccagagatctctccattgtgcaaattttttttattattgcattttattttgaccctggactgctgctatgaacaatagaatatgcatttggaaagtaagaaagtttcatggattagagtgactgaaaaacatatccagttagaaaattgtgcttttttttttttttttttttttttttgtcattgatttgtgctgggactgctatacttgacattatactgcaaacaaaacttaaagagataagcattaaacctattgtgctgttaacaacgttagtggacacttgtaagtcaatcagtgttaaagtatttgtaaatagaagcaagctattattaacaacttttgtgtacttataatgttcacctaaaaatgttgtagcataattctgtgttttatggttgcttctgtccttctttttatttacctctttgttgttatttttgttgtttctttcagtgaggtgtttctgtgttagtagtctgtcttgacacacattgttcaaacaatctcaagcacttgtgtttaaaaaaggttctgaaatcttgcttctcatatgatagcttatgatgccggaattctgtaaacaataaagatgaaagaaaaaatgaaaactttatacaaaaaaggacttctgcaaaagcttggaaattcagaacctattttttatcatcttattttcaaagtaggcaaaagcaaaatcacttaattagtaccattaagtgagagagtaatggaaaactgttatccatcaaaagtgatataatatcctgtacttgtcactcatgtaaaactaatgtatcaaaattagcatatatggaagaaaaatcactattcaaaaatagtttcaattgggcaaatgtgtgtctacaactttgttgaaatggcagagtctgtgttgatcctcatatacaataatgttgttgtaacacaagtgttattagaccatagccacaaaatatttaatgtgttgtgccttcatgatgtaacagaacattctccaggtagggtagttgggggaaataaagggataaatctctaattattgctgtttaactgtttgttatcatagttggtcaatgcctggcaggtaccagcatattgtcacttaggtcaaaccaataaagtgacaactaatgttaataagatctcagttgcacgtgcaaacaaatccaaattcgaacattcttaggaggtttttgttaaggcatgacagatgatttaaacaaataaatagcatgcaacaaaatgtctttattgaaagaagtggaagttatcttaatgccacggttcaccatcaatttaaaagtaaaaaaaacaaaaaaaaaacaaaaaatttaaaaaaaaggtttgctaatctgatagttaatttgttcttaccaaaaaataaaattactttgtaaatagcagttcacatttttccacagtataatggaaaataatgggtaggggtgcattgcttattgaagtacatttttgtcggtttgtgaggggtgtttgatgactttgacagaataaatatctaaacaattatccttgttactgctttgccagttctacgttatttacaattattcagctcttgcaataaatgttctgaattcctgaaaaaaaa

SEQ ID NO: 425 - DNA, 874 bp, Homo sapiens
agttcctccacctgctggcccctggacacctctgtcaccatgtggttcctggttctgtgcctcgccctgtccctgggggggactggtgctgcgcccccgattcagtcccggattgtgggaggctgggagtgtgagcagcattcccagccctggcaggcggctctgtaccatttcagcactttccagtgtgggggcatcctggtgcaccgccagtgggtgctcacagctgctcattgcatcagcgacaattaccagctctggctgggtcgccacaacttgtttgacgacgaaaacacagcccagtttgttcatgtcagtgagagcttcccacaccctggcttcaacatgagcctcctggagaaccacacccgccaagcagacgaggactacagccacgacctcatgctgctccgcctgacagagcctgctgataccatcacagatgctgtgaaggtcgtggagttgcccaccgaggaacccgaagtggggagcacctgtttggcttccggctggggcagcatcgaaccagagaatttctcatttccagatgatctccagtgtgtggacctcaaaatcctgcctaatgatgagtgcaaaaaagcccacgtccagaaggtgacagacttcatgctgtgtgtcggacacctggaaggtggcaaagacacctgtgtgggtgattcagggggcccgctgatgtgtgatggtgtgctccaaggtgtcacatcatggggctacgtcccttgtggcacccccaataagccttctgtcgccgtcagagtgctgtcttatgtgaagtggatcgaggacaccatagcggagaactcctgaacgcccagccctgtcccctacccccagtaaaatcaaatgtgcatcc

SEQ ID NO: 426 - DNA, 3954 bp, Homo sapiens
agggggaggtgggcagccggccagggaagcacggtccaggcggctacattcggcccggccatggcagcggcgcccctgaaagtgtgcatcgtgggctcggggaactggggttcagctgttgcaaaaataattggtaataatgtcaagaaacttcagaaatttgcctccacagtcaagatgtgggtctttgaagaaacagtgaatggcagaaaactgacagacatcataaataatgaccatgaaaatgtaaaatatcttcctggacacaagctgccagaaaatgtggttgccatgtcaaatcttagcgaggctgtgcaggatgcagacctgctggtgtttgtcattccccaccagttcattcacagaatctgtgatgagatcactgggagagtgcccaagaaagcgctgggaatcaccctcatcaagggcatagacgagggccccgaggggctgaagctcatttctgacatcatccgtgagaagatgggtattgacatcagtgtgctgatgggagccaacattgccaatgaggtggctgcagagaagttctgtgagaccaccatcggcagcaaagtaatggagaacggccttctcttcaaagaacttctgcagactccaaattttcgaattaccgtggttgatgatgcagacactgttgaactatgtggtgcgcttaagaacatcgtagctgtgggagctgggttctgcgacggcctccgctgtggagacaacaccaaagcggccgtcatccgcctgggactcatggaaatgattgcttttgccaggatcttctgcaaaggccaagtgtctacagccaccttcctagagagctgcggggtggccgacctgatcaccacctgttacggagggcggaaccgcagggtggccgaggccttcgccagaactgggaagaccattgaagagttggagaaggagatgctgaatgggcaaaagctccaaggaccgcagacttctgctgaagtgtaccgcatcctcaaacagaagggactactggacaagtttccattgtttactgcagtgtatcagatctgctacgaaagcagaccagttcaagagatgttgtcttgtcttcagagccatccagagcatacataaagtgaatcatgcaacgtgttgggggaagttctgcctttctgatcaatcttttgggttcacgtggaaaccaggacttggcaacatgatgtttgactgtaatctcatcacggatatgtatgaatttttacaggttcgtttttgaattgtgagaggcagttcattagcaaagatgtactgggcagtaactaaacacacatgcaaacatgtgaatggtggtttattcctcattctgtggatgtttctatgagccaaaatttgatgtctttttttcaaaattgcttatgaaatttccacacaatcgtagcttataagattggaacgatctcagccaaatattttaggtgtaattcatatgtatttgagtggaggattttttttctcatttttctagtgttaaattttaaccagcattaacatggtagagtggaggagtgagtgtgttcaaagatcaacatatttaacttttaaacactatctcaaagccagcataattaactactttgattgtgggctgacctttgtttttttaacaatcaggcatttttaattagataatccactcatgtatttccccctcactgcagttgtctgcatttttagcctcttttctcttcgttagttgtcagaatatgccttcgtcaaggctcagaggtaacaagacagaaaattcatctgggattttcctgctgtggctggcacattcttctgattaacagacacttgtatgatgctttaggctagttagtgcattttttagcaaacatttatcttaaacatcacagatccactggggggtgcaaggggctactgttagtcctcttgttagatgcagtcactcctcctggtcacctagtgagcagggacagagccaggagtcaagtgcagtgccaaggtgcatgaccctctgagaagtcactgggctgatttgacctccgactcattggttgtgcaaatgccatgtgcagcctttcctgaggccataggagggcttcctgcagctgagatctatgcaggccatcctctcaacaagtgccactccaagggcggtcctcggtgcagcagcatcagcttcacttgtgggggggtgggggaaggggcggtctcagaaatgcaggttcccaggtcccaccctggacttctgaaggggtgtggcatctgtgtttctgatgcttactacaatatgtgaaccactactttagaaaatctgctttaacttggtattcctctaattgtgttccctaggaaatgactgtcccaagagccagtgattattccaggtgttccctggaaaggtcaagtgagtctgggaaacactatgtctgtacacctcttgaaggtgtcgaatgtatgtttatacatcagtggaacccatttttctagcctagcaagtcccaaacacattacactgaagagattttggtgaggaaacttgctggagttttcagggaacactgttctaggcttaggtgaccttaggatcactcaagtagacgcttcactccctgcgagaaattaggatgaataactacctgtggcattgttggttctgaacttttacagttcaggcctgctgtgaatctttgatgaagctttaaggtgacactgttgtacaagatgtcagctttgctgaaacgcacattacctggaataagtgctttaattgtagaattagaatgggatttactgtactgttttaaatgagattggcttcagaatccattacagttaccttacatagcacttgatacgtgttaaatgaacatatgaatgtaatttatatattcctagaatttaagttactttgtgagatttgggcctgtccctcaatgccagtttaggatttctttttttctataccttgaaatgattataaaatagattttcatgggaattttaaaaactctatccaaaacatttttggagcattttaaagccccatacacagaagtatacgaaagcacacaaaacactccaagtttcagcagttttagcgccaccattaacccactttgcttgtctcatgaaaaatctttgttaaagtttgtacacaggtaacaaaaagttactttaaaagatatataaagggctgtaagctaattgtggtgtctagtaagtagcataatgagatgtgaggagttggaactttgcgtgttttgcgtattttcatctgcattcagcttcttactctgggtttgtactcgagtgttatttctttacaaatgcccttgtaattaccactctgaagtctgctgactgtgtctcttgaacatacttaggatattctgcacattatggaaaaaggtaaattttagaagtttctgctctactaactgtagatatttatgactctgcgagttatctatttttataaccacctgtggtccattgttcattttaattcacatttcttatgaagtatggtaacagggagggagacacctagattagcagctcaatttgtactacttcagccaatctgtgaatgtaaaaactacactgttgccttgctaggatccaccctcctataatatggaacaaatatctgaatgaaatccaccctaggagacggagtcaaactaaacttgtggtttttcatttaacttttgactacagcatggccccatggcatccacaccaagagggtgttgtgatgaggtgccggtgtgcaaagggaactttagtttttccactggttcttatctgctagccttttacatacatgtgtactatatttgtttatagactgtaggtggatatataatttaaaagcttgatttaataaacatttaaccccataaaaaaaaaaaaaaaaaaaaaaaaagaaaaaaaaaaaaaaaa

SEQ ID NO: 427 - DNA, 4352 bp, Homo sapiens
cccgggcctcctcccgctttctctctccgcttcccctggagcctccgaggagtccgcagccgctgggcgcccgggaagatggcggcggcggcgggagacggcggcggcgaggggggcgcgggcctgggcagcgcggcggggctggggccggggccggggctgcgcgggcagggcccctcagccgaagcgcacgagggcgccccggacccgatgcccgccgcgctgcaccctgaggaggtcgccgcgcgactgcagcggatgcagcgggagctgagcaaccgcaggaaaatcctggtgaaaaacctgccccaggacagcaactgccaggaagttcatgatttgttaaaagactatgacttaaaatattgttatgtggacagaaataaacgaacagcttttgttaccttattgaatggggaacaagcccagaacgcaattcagatgtttcatcaatattcttttagaggaaaagacttaatagtccagcttcagccaacagatgctttgttgtgtattaccaacgtgcccatttcttttacatcagaagagtttgaagaacttgttcgtgcttatggaaatattgagagatgttttctggtctatagtgaagttactggccattccaaaggctatggatttgtggaatacatgaaaaaggactttgctgcaaaggctagactggagctattgggtagacagttgggagcatcagcactctttgcacaatggatggatgttaatctattggcttcagagctcattcattctaagtgcctttgtattgataaactccccagtgactacagggattcagaagagctgttgcaaattttttccagtgtccataaacctgtgttttgccagcttgcacaggatgaaggtagttacgttggtggctttgcagtggttgaatatagcactgcggagcaggctgaagaggtccagcaggcagcagacggtatgaccatcaagggcagcaaagtccaggtttccttctgtgctcctggagcgccagggcgaagtacattagcagcattgatagcggctcaacgtgtgatgcacagtaatcaaaagggcttacttccagagccaaatccagtacaaattatgaaaagtttaaacaaccctgccatgttgcaagttcttctacagccccagttatgtggacgagctgttaaaccagccgttcttggaacacctcacagcttgccacatctgatgaatccatccatctctcctgcatttttacatttgaataaagcacatcagaatctttctcatataccactggcacaacaacaattaatgaagtttgagaatattcatactaataataaacccggcttacttggagagcccccagctgtggtacttcagactgcactagggatagggtcagtgcttccattgaaaaaggagttgggacatcatcatggagaagcacataaaacatctagcctgattccaactcaaacaacgataacagctggaatgggcatgttaccattctttccaaatcagcacattgctggacaggctgggccagggcacagtaatactcaggagaaacagccagccacggtgggaatggcagaaggaaatttctcagggtcgcagccttatcttcagagctttccaaaccttgctgctggaagcttgctggtgggacaccataagcagcagcaaagccagccaaaaggcacagagataagttcaggggctgcctctaagaatcaaacttcactcttgggagaaccaccaaaagaaattcggctcagtaaaaatccatacttgaatttggcaagtgtgttgcccagtgtgtgcttatcatcccctgcaagtaaaaccactcttcataagactggaattgcaagcagcattctggatgcaatctctcagggaagtgaatcacaacacgcattggaaaagtgcattgcttattctccaccttttggtgattatgcacaggtgtcatctttaagaaatgaaaagcgaggctcatcatatctcatctctgccccagaaggtggttcagtggaatgtgttgaccagcattctcagggcacaggagcatattacatggaaacttacttaaaaaagaagcgagtatactgagttaagctctctcctaataaccccctaaggttctctgcagtatctctgctgttcatcgctgccttaacttcattcaaactagccatatcctttaaatacgggtttatagtttcccagaaggaactgtgttgtgcagcaggcagaaatgccaaataaaaaatagcaataagaagagacatcaattgaggacattttccactagagtcagatgcatcttaatcagtgtgctaacttacaatccattggagaaactaacaatgttccaatattccttgatttaggactgggaataattctgacaccatatataaaagaagtttgaagcaataaatgggaaacagtgttgtttcctgagccttagaagaatgagtttcttataagccaatgtgcatttcaatttactttccctagaagtaattgcatttatagatttttaggacttttcctagaactacaagggtgcaagtaccaaatgtgctgatggtaatattataaagatgctctacatgcacactcaattacgcccacaccagccatgcaaaattaaacccggtaagagagtgacagtgatgtccaaggtatccactactaccgatgctttaagatgttgtttaccatttataccttctgtgaaaaatagaaggtattttaagaaaagtaactttggtgatctaataaaagggtttggcaaactacaccctgggtccacatttggtctaccacccgcttttgtgctgcctgcaagctaagactaatgtttacatttttaaatggttggaggaaaaaagaaaacttatgacatgaaatttatatgaaattcagatttcagtgtccataaataaacttttattgggacgttgccatgctcattcatttacgtgttgtctgtggcactcttacgctacaagggcagaactgattagcttcaacagagactgtatggcctacaaagaccatatggcctaaaatttcaagtatctggccatttatatatagtttgctgatccctgatctaatagcactaattctaatagcaactattcctttcaattcacctaaagacagacctttagcctttagacagacttgtaagtggaaaggaacatgggtttctgtgctcatttcatagcgtagactagtaatgatctaatgactagaatggggcctattttgatcactaaatgccctatttccacaatatagtatagtaaagcagtcaatactgcactttctgatggagtcttaaggagtcacagtatttataaccattttgagctaataagctatacctcactctctgctttctctctctctctttttgatagtgtgttagggtgaaaaatcagttatttaacccaatttacttgtgaaagaagttttatctttatggactatgatgacttttgacatcaccatttcttgaagaccttggtattaaatgcatgagaaaccttttgccatctagaaatttctaagtttgtttatgttataagactgtaattaattgatagggaatttgggatctcaatccggggctttttgaaatcagatcattaaatatctcgtcactttggggacttgttatttttaactatgatgtggatatcctgttttaattatgaagtctagaattggtacatatgttgtatgctttgtaaagaatttcacttggtctaatttattgcatatactagcttctgttggaaaatgactgacagctagaaagtttaaggtaatttctaagtatactacctataagtaactgataagaattaggcatcattcagtgatatagcagatgactaatgggtttttcaggccctgcacttctctttcccattttcctgttgcattcagcctcttcaatgcttagtcacacctccactatagtacaaacaaacaaacaaacagaagaaaggaaagatggtgaattttgcaacagagctgcaaaaagtcagtcaaagcaggaagaggttgaaggaactaaaacaaacaaacaaaggtgtctggactacagcacagtggacatgccatccatactggcctgtgccccgttatcaatcactgggcacaacagtgaagaagtgcaaatcaagtggtgtttgtttgtttgtttgtagtaaggaccgtaacccaccccttcctccccccaaaactatactgttatttttctatgtaagcaaattgtttgaaatgctttgaaaatgaaatcttaatattaaaaggcatatgcatgt

SEQ ID NO: 428 - DNA, 2326 bp, Homo sapiens
ctaccgggggtcccttgctacccatatgtgtgaagaaaagggggaaatgaaagccctagaacccacactgcagtgggcatgggatcatcctggaaccaggagaaacgaggttagggctaccaccttaaccgcccaggtgctggctctgcgtgaatatcttaggaaatgcaagctgaggacaggtcacaatttgggtctgcagcagaaatgctttcagaacagacagcagcgctggggacaggatgggaatcaatgaatgtacagctggatggagcagagccccaggtggaaaggggaagccaggaagagcggccatggagaacagtaccaggacctctggagcacctgtgctgtgaccttgaagaggagccacagtcccttcaggagaaggctcagtctgctccctgggttcctgcaattccccaggaggggaacactggagactgggagatggcagctgcacttcttgcggctggatcacagggcctggtaaccatcaaggatgtgtcactgtgcttctctcaggaggagtggcggagcctggacccctctcagacagacttttatggagaatatgtcatgcaggaaaactgtgggatagtagtctctctgagatttccaattcccaaactggacatgctttctcaactagaaggaggagaagaacaatgggtccctgacccccaggacttagaggagagggacattctgagggtcacatatacaggaggtggaagtgaacatgagggggatacccctgaactagaagcagaacctcccagaatgttatccagcgtgtctgaagatactgttctctggaacccggagcatgatgagagctgggattccatgcccagcagctccagaggaatgctcctggggcccccttttcttcaggaagatagtttctcaaacctgctgtgtagcacagagatggattccctgttaagaccccacacatgcccccagtgtgggaaacagtttgtatggggttcccaccttgccaggcatcaacaaacacacactggggagagaccctacagctgcctcaagtgtgagaagacctttgggcgaagacatcacctcatcaggcaccagaaaacccacctacatgacaagaccagcaggtgctctgagtgtggtaagaatttccgatgcaactcccatctggccagccaccagagagtgcatgcagaaggcaaatcctgcaaaggccaagaggttggagagagccctggcacaaggaaacggcagcgtgccccaccagtgccaaagtgtcacgtgtgcactgaatgtgggaagagctttggccgaaggcaccaccttgtgagacactggctgacccacactggggagaagcccttccagtgccctcgctgtgagaagagctttggccgaaaacatcacctggacaggcacctgctcacccaccagggacaaagtccccggaacagctgggacagaggaacatctgtcttctgaaatctgtttccactacagctatggtcaagtctatcagccggtgctaccaggagtcactgccagggctgccgttctcctgaaccccagtggccagaatcataagccctgaccccatccctagaaagatgaggtcccagcaatggccagagcatttctcaccagttctgtgagatagcacataaaaatagagttctttgggcaaaacttttgggaagcaatgcatcctacatgggctgatattcagcctgagctgttctcaagaggagagtggtactggcagtttatggctgaaatccattctgattggttggagtctatgctataccagttgttaaacattttgagtatcactcttgcatactgttactattatattttctctatatatagacagaaaggccattttagaatattaaaggctctgaaaatttctgcagtagacccaactgaagtttctattaaggcagtgtttcctaaatgtatttgacctcagtatcctttctatttacatcccacagaactggtgactatgaaacactctggtgaacactgggttagagagtaacaaggaaacaagagatagtgatcaggcatccagagcccccttttttatccatatgaaagccaggggggccagaccttgttcatgtgtgggtctgtcttccttatgccaatcagcagtatatacatcacctctcaccctcacctgctgaaaaaataacctttttacccattattcctactcccttcatcctgcacatacatatatccagctgagagatcacactacaaggctaagagatgatctaatacccccaaatagccctggcccacacagaaaaac

SEQ ID NO: 429 - DNA, 883 bp, Homo sapiens
gcacgtcggccctgcctcccggaccaccctgcggggcgcaccaccgatctggggtgcggggctcggcctccctgcgctcctggctgacggtgtgaccttgggaccgagacgtgcagctgtccaaggctctgtcctatgccctgcgccatggggccttgaagctggggcttcccatgggagctgatggcttcgtgcccctgggcaccctcctgcagttgccccagttccgcggcttctctgctgaagatgtgcagcgcgtggtggacaccaataggaagcagcggttcgccctgcagctgggcgatcccagcactggccttctcatccgggccaaccagggccattccctgcaggtacctaagttggagctgatgcccctggagacaccgcaggccctgcccccgatgctagtccatggtacattctggaagcactggccatccatcctactcaaaggcctgtcctgccagggaaggacgcacattcacctggccccaggactgcctggagaccccggtatcatcagtggcatgcggtcccattgtgaaatagctgtgttcatcgatggacccctggctctggcagatggaatacccttcttccgctctgccaatggggtgattctgactccagggaatactgatggcttcctccttcccaagtacttcaaggaggccctgcagctacgccctacccgaaagcccctttccttggctggtgatgaagagacagagtgtcagagtagccccaagcacagctccagagaaaggaggaggatccaacaataaaatattaatttataaaaaagaaattttaaaaagtaacaagaaagaactcgtttgaaaccatgtttcatcatcctgtaaaaaaaaaaaaaaaaaaa

SEQ ID NO: 430 - DNA, 3158 bp, Homo sapiens
aaaccggaacggggcccaacttctggggcctggagaagggaaacgaagtcccccccggtttcccgaggttgcctttcctcgggcatccttggtttcggcgggacttcgcagggcggatataaagaacggcgcctttgggaagaggcggagaccggctttaaagaaagaagtcttggtcctgcggcttgggcgaggcaagggcgaggcaagggcgctttctgccgacgctccccgtggccctacgatcccccgcgcgtccgccgctgttctaaggagagaagtgggggccccccaggctcgcgcgtggagcgaagcagcatgggcagtcggtgcgcgctggccctggcggtgctctcggccttgctgtgtcaggtctggagctctggggtgttcgaactgaagctgcaggagttcgtcaacaagaaggggctgctggggaaccgcaactgctgccgcgggggcgcggggccaccgccgtgcgcctgccggaccttcttccgcgtgtgcctcaagcactaccaggccagcgtgtcccccgagccgccctgcacctacggcagcgccgtcacccccgtgctgggcgtcgactccttcagtctgcccgacggcgggggcgccgactccgcgttcagcaaccccatccgcttccccttcggcttcacctggccgggcaccttctctctgattattgaagctctccacacagattctcctgatgacctcgcaacagaaaacccagaaagactcatcagccgcctggccacccagaggcacctgacggtgggcgaggagtggtcccaggacctgcacagcagcggccgcacggacctcaagtactcctaccgcttcgtgtgtgacgaacactactacggagagggctgctccgttttctgccgtccccgggacgatgccttcggccacttcacctgtggggagcgtggggagaaagtgtgcaaccctggctggaaagggccctactgcacagagccgatctgcctgcctggatgtgatgagcagcatggattttgtgacaaaccaggggaatgcaagtgcagagtgggctggcagggccggtactgtgacgagtgtatccgctatccaggctgtctccatggcacctgccagcagccctggcagtgcaactgccaggaaggctgggggggccttttctgcaaccaggacctgaactactgcacacaccataagccctgcaagaatggagccacctgcaccaacacgggccaggggagctacacttgctcttgccggcctgggtacacaggtgccacctgcgagctggggattgacgagtgtgaccccagcccttgtaagaacggagggagctgcacggatctcgagaacagctactcctgtacctgcccacccggcttctacggcaaaatctgtgaattgagtgccatgacctgtgcggacggcccttgctttaacgggggtcggtgctcagacagccccgatggagggtacagctgccgctgccccgtgggctactccggcttcaactgtgagaagaaaattgactactgcagctcttcaccctgttctaatggtgccaagtgtgtggacctcggtgatgcctacctgtgccgctgccaggccggcttctcggggaggcactgtgacgacaacgtggacgactgcgcctcctccccgtgcgccaacgggggcacctgccgggatggcgtgaacgacttctcctgcacctgcccgcctggctacacgggcaggaactgcagtgcccccgtcagcaggtgcgagcacgcaccctgccacaatggggccacctgccaccagaggggccacggctatgtgtgcgaatgtgcccgaagctacgggggtcccaactgccagttcctgctccccgagctgcccccgggcccagcggtggtggacctcactgagaagctagagggccagggcgggccattcccctgggtggccgtgtgcgccggggtcatccttgtcctcatgctgctgctgggctgtgccgctgtggtggtctgcgtccggctgaggctgcagaagcaccggcccccagccgacccctgccggggggagacggagaccatgaacaacctggccaactgccagcgtgagaaggacatctcagtcagcatcatcggggccacgcagatcaagaacaccaacaagaaggcggacttccacggggaccacagcgccgacaagaatggcttcaaggcccgctacccagcggtggactataacctcgtgcaggacctcaagggtgacgacaccgccgtcagggacgcgcacagcaagcgtgacaccaagtgccagccccagggctcctcaggggaggagaaggggaccccgaccacactcaggggtggagaagcatctgaaagaaaaaggccggactcgggctgttcaacttcaaaagacaccaagtaccagtcggtgtacgtcatatccgaggagaaggatgagtgcgtcatagcaactgaggtgtaaaatggaagtgagatggcaagactcccgtttctcttaaaataagtaaaattccaaggatatatgccccaacgaatgctgctgaagaggagggaggcctcgtggactgctgctgagaaaccgagttcagaccgagcaggttctcctcctgaggtcctcgacgcctgccgacagcctgtcgcggcccggccgcctgcggcactgccttccgtgacgtcgccgttgcactatggacagttgctcttaagagaatatatatttaaatgggtgaactgaattacgcctaagaagcatgcactgcctgagtgtatattttggattcttatgagccagtcttttcttgaattagaaacacaaacactgcctttattgtcctttttgatacgaagatgtgctttttctagatggaaaagatgtgtgttattttttggatttgtaaaaatatttttcatgatatctgtaaagcttgagtattttgtgatgttcgttttttataatttaaattttggtaaatatgtacaaaggcacttcgggtctatgtgactatatttttttgtatataaatgtatttatggaatattgtgccaatgttatttgagttttttactgttttgttaatgaagaaattcctttttaaaatatttttccaaaataaattttatgaggaattc

SEQ ID NO: 431 - DNA, 3125 bp, Homo sapiens
ccgcgcccctcccctcacgggctctggccttaaccagagctcgcggactggcggggacaggtcccacctcctggctcccaggacgggtctgcaccaacctcagtttcggggctgcggctcacagaagtctaacctgcccgggacgcccgcaccaactcctgcgcgcggtccttccaaccctcctgctaccatgaagattgcagtgattggacagagcctgtttggccaggaagtttactgccacctgaggaaggagggccacgaagtggtgggtgtgttcactgttccagacaaggatggaaaggccgaccccctgggtctggaagctgagaaggatggagtgccggtattcaagtactcccggtggcgtgcaaaaggacaggctttgcctgatgtggtggcaaaataccaggctttgggggccgagctcaacgtcctgcccttctgcagccaattcatccccatggagataatcagtgccccccggcatggctccatcatctatcacccgtcactgctccctaggcaccgaggggcctcggccatcaactggaccctcattcacggagataagaaaggggggttttccatcttctgggcggatgatggtctggacaccggagacctgctgctgcagaaggagtgtgaggtgctcccggacgacaccgtgagcacgctgtacaaccgcttcctcttccctgaaggcatcaaagggatggtgcaggccgtgaggctgatcgctgagggcaaagcccccagactccctcagcctgaggaaggagccacctatgaggggattcagaagaaggagacagccaagatcaactgggaccagccggcagaggccattcacaactggatccgcgggaacgacaaggtgccgggagcctggacagaggcctgtgaacagaaactgacatttttcaactcaacgctgaacacttcaggcctggtgcccgagggagacgctttgcccatcccaggagcccatcggccaggggtggtcaccaaagcaggactcatcctctttgggaatgatgacaaaatgctgctggtgaagaatattcagctggaggatggcaaaatgatcctggcctcgaacttctttaagggggcagccagcagtgtccttgagctgacagaggcagagctggttactgcggaggctgtgcggagtgtttggcagcggatcctccccaaagtcctggaggttgaagactccactgatttcttcaagtcaggggccgcgtctgtggacgttgtgaggctggtggaggaagtgaaggagctgtgtgatggcctggagttagaaaatgaagatgtgtacatggcatccacctttggggacttcatccagctgttagtgaggaagctgcgaggggacgatgaggagggcgagtgcagcattgactacgtggaaatggcagtgaacaagcgcactgtccgcatgccccaccagctcttcattgggggggagttcgtggatgccgagggcgccaagacctctgagaccatcaatcccaccgatggaagtgtcatctgccaggtatccctggcccaagtcaccgacgtcgacaaggcagtggccgcagccaaggatgcctttgagaatggacggtgggggaagatcagtgcgcgggaccggggccggctgatgtacaggttggcagatctcatggagcagcaccaggaggagctggccaccattgaggccctggatgcgggtgccgtctacacgctggccctgaagacccacgtgggcatgtccatccagaccttccgctactttgctggctggtgtgacaagatccagggctccaccatccccatcaaccaggccagacccaaccgcaacctgaccttgaccaggaaggagcctgttggggtttgtggcatcatcatcccctggaactatcccctgatgatgctgtcctggaagacagctgcctgcctggctgccgggaacacagtggtgatcaagcctgctcaggtgaccccactcacagccttgaagtttgcagagctgacattaaaggccggcattcccaaaggtgtggttaacgtcctcccaggatctggctccctggtcggccagagactctcagaccatcctgatgtgaggaaaatcgggttcacaggctccacagaggtgggcaagcacatcatgaaaagctgtgccataagtaacgtgaagaaggtgtccctggaactgggcgggaagtcacccctcatcatctttgctgactgtgacctcaacaaggctgtgcagatggggatgagttctgttttcttcaacaaaggagagaattgcattgcagcaggccgactctttgtggaggactccattcatgatgagttcgtgcggagagtggtagaagaggtgcggaagatgaaggtgggcaacccgctggacagggacaccgaccacgggccgcagaatcaccatgcccaccttgtgaagctgatggagtactgccagcatggcgtgaaggaaggggccacactggtctgcggcgggaatcaggtccctcggccagggttcttctttgagccaactgttttcacagacgtggaagaccacatgttcatagccaaggaggagtccttcgggcctgtcatgatcatctctcggtttgctgatggggacttggatgccgtgctgtctcgggccaatgccacggaatttggcctggcttctggtgtcttcaccagggacatcaacaaggccctgtatgtcagtgacaagctccaggcaggcactgtgtttgtcaacacgtacaacaagaccgacgtggccgctcccttcggaggattcaaacagtctggatttggcaaagatctaggagaggcggctctgaacgagtacctgcgggtcaagacagtgaccttcgaatactgaagaaaggtctttgtgagaagaaagtccctgcccctccctcgtggctggggccccctccctcttgagcctgggtgcacagcacctcccacctggggggctagtggaagccctcctgcctgcacaccatgtctgcatcttggacgccctctgtccagtcagaagcagcccttggctgggtgaggtgtgcccctcccagggagaataaagcttctgaagagagaccgtc

SEQ ID NO: 432 - DNA, 3775 bp, Homo sapiens
ccctgctcctccgcctgggcggcccggctgcggtgacggctctcgctgcccgactgggggccatgaagccgagtccggccgggacggcgaaggagctggagcctccggcgccggcccgaggcgagcagcgcacggcggagcccgaggggcgctggcgggagaagggcgaggcagacaccgagcggcagcgcacccgggagcggcaggaggccacgctggccgggctggcggagctggagtacctgcgccagcgccaagagctgctggtcaggggcgccctgcgcggcgccgggggtgcgggagccgctgcgccccgcgctggggagctactgggggaggcggcgcagcgcagtcgcctggaggagaagttcttggaggagaacatcttgctgctaagaaagcaattgaactgtttgaggcgaagagatgctggtttgttgaatcagttgcaagagcttgacaagcagataagtgacctgagactggatgtagaaaagacatctgaagagcacctggagacagacagtcggcctagctcagggttttatgagctgagtgatggggcttcaggatccctttccaattcctctaactcggtgttcagtgagtgtttatccagttgtcattccagcacctgcttttgcagccccttggaggcgaccttgagtctctcagatggttgccccaaatctgcagatctcataggattgttggaatataaagaaggccactgtgaagaccaggcctcaggggcagtttgccgttccctctccacaccacaatttaattcccttgatgtcattgcagatgtgaatcccaagtaccagtgtgatctggtgtctaaaaacgggaatgatgtatatcgctatcccagtccacttcatgctgtggctgtgcagagcccaatgtttctcctttgtctgacgggcaaccctctgagggaagaggacaggcttggaaaccatgccagtgacatttgcggtggatctgagctagatgccgtcaaaacagacagttccttaccgtccccaagcagtctgtggtctgcttcccatccttcatccagcaagaaaatggatggctacattctgagcctggtccagaaaaaaacacaccctgtaaggaccaacaaaccaagaaccagcgtgaacgctgaccccacgaaagggcttctgaggaacgggagcgtttgtgtcagagccccgggcggtgtctcacagggcaacagtgtgaaccttaagaattcgaaacaggcgtgtctgccctctggcgggataccttctctgaacaatgggacattctccccaccgaagcagtggtcgaaagaatcaaaggccgaacaagccgaaagcaagagggtgcccctgccagagggctgcccctcaggcgctgcctccgaccttcagagtaagcacctgccaaaaacggccaagccagcctcgcaagaacatgctcggtgttccgccattgggacaggggagtcccctaaggaaagcgctcagctctcaggggcctctccaaaagagagtcctagcagaggccctgccccgccgcaggagaacaaagttgtacagcccctgaaaaagatgtcacagaaaaacagcctgcagggcgtccccccggccactcctcccctgctgtctacagctttccccgtggaagagaggcctgccttggatttcaagagcgagggctcttcccaaagcctggaggaagcgcacctggtcaaggcccagtttatcccggggcagcagcccagtgtcaggctccaccggggccacaggaacatgggcgtcgtgaagaactccagcctgaagcaccgcggcccagccctccaggggctggagaacggcttgcccaccgtcagggagaaaacgcgggccgggagcaagaagtgtcgcttcccagatgacttggatacaaataagaaactcaagaaagcctcctccaaggggaggaagagtgggggcgggcccgaggctggtgttcccggcaggcccgcgggcgggggccacagggcggggagcagggcgcatggccacggacgggaggcggtggtggccaaacctaagcacaagcgaactgactaccggcggtggaagtcctcggccgagatttcctacgaagaggccctgaggagggcccggcgcggtcgccgggagaatgtggggctgtaccccgcgcctgtgcctctgccctacgccagcccctacgcctacgtggctagcgactccgagtactcggccgagtgcgagtccctgttccactccaccgtggtggacaccagtgaggacgagcagagcaattacaccaccaactgcttcggggacagcgagtcgagtgtgagcgagggcgagttcgtgggggagagcacaaccaccagcgactctgaagaaagcgggggcttaatttggtcccagtttgtccagactctgcccattcaaacggtaacggccccagaccttcacaaccaccccgcaaaaacctttgtcaaaattaaggcctcacataacctcaagaagaagatcctccgctttcggtctggctctttgaaactgatgacgacggtttgagtgacatcattggtgtagaaagtttgtgtgtttttttttcttctccctagttgccaaaattaaaaaggtggtgttttcatttttgtataatactttaatggaatgctttttaaaaaaatataaaaccaaggtaaattattgtttcatcttcacgtatggatgctagtgcctttaatggaaggtaaagaatgttttgctagttagaagtacatattgaggttttaatggtggtgatagtgagttttgtggcaccagctgttttttattttaaactttctgagcatccggcaaggtacaggttttgatgttcaagttttattgggataagatcttttgatcccaaggtcaggtggatggaatttttggatttatatttgttccttgagtcttcagggcagtgtctccatgagggttttcctgttgaggggcaccacatacaatagtgtgaagtaggtatgaggggcagtcattgtattctatagtttttttatgtagtctacatttctcagatgtatccccattcggttttattctcagaactgttactagactcatgacttggaggccaaaccttaaatccagagatagcagcctcgatagggaccttaaaaggattcacaaaaacttttgccacacttggtgcctaggccctgttcctaataaccccttctagggccgtttatccaacatttagatgccttcttttccctccctaatttgtagccagtccaacctttcattccttggaggatttagttttgggataaaattttggtccttgggcacagagacattcactattaatgaagtaacccttgggcatgactccaatcccagaattgctcactgagcgctatgccaccgaagcgttgacctgaacatattagtgcaatccagtccagattggacctttgatcctatgtggaagggctgttttttaagaaaaaatttttggtaaacagtattgtgtaaaattgctttttgtataccaatatatgcatgttttgtgcatgagtagtacttgtgttgatactcctgttgatgttaaattactatataatataaacagtatgtgtttttatatatcattgtgtaaatttaatataacatatgcagtaataaaccatttgttttactgctgttaagtttgttatttgggtataaaaccagatgtttacacctgtaaaaaaaaaaaaaaaaaa

SEQ ID NO: 433 - DNA, 2963 bp, Homo sapiens
cgcttcgctgcctggcggcctttccccgagccgagcccgcttcccgaggccgccagtcgtcgcctgcccgcgcctgcgcagcgtcccgggccgagagggccacggcggcggccatggcgcaccgctgtttgcggctgtggggccggggcggctgctggccccgcggcctacagcagctcctcgtgcctggcggcgtgggcccgggcgagcagccctgcctccggacgctttaccgatttgttacaactcaagcaagggccagcagaaattctcttttgacagatataattgctgcttatcaaagattctgttctcgacccccaaaaggatttggaaaatactttcctaatggaaaaaatggaaaaaaagctagtgaacctaaagaagttatgggagagaaaaaagaatcaaagccagctgctaccacacgctcttctggaggaggaggtggtggcggtggaaaacgaggtggcaagaaagatgattctcactggtggtccaggtttcagaagggtgacattccatgggacgacaaggatttcaggatgttcttcctctggactgctctgttctggggtggagtcatgttttacttgctgctcaagagatccgggagagaaatcacttggaaggactttgtcaataactatctttcaaaaggagtagtagacagattggaagtcgtcaacaagcgttttgttcgagtgacctttacaccaggaaaaactcctgttgatgggcaatacgtttggtttaatattggcagtgtggacacctttgaacggaatctggaaactttacagcaggaattgggcatagaaggagaaaatcgggtgcctgttgtctacattgctgaaagtgatggctcttttctgctgagcatgctgcctacggtgctcatcatcgccttcttgctctacaccatcagaagagggcctgctggcattggccggacaggccgagggatgggcggactcttcagtgtcggagaaaccactgccaaggtcttaaaggatgaaattgatgtgaagttcaaagatgtggctggctgtgaggaggccaagctagagatcatggaatttgtgaatttcttgaaaaacccaaagcagtatcaagacctaggagcaaaaatcccaaagggtgccattctcactggtcctccaggcactgggaagacgctgctagctaaggccacagccggagaagccaatgtccccttcatcaccgttagtggatctgagtttttggagatgttcgttggtgtgggccctgctagagtccgagacttatttgcccttgctcggaagaatgccccttgcatcctcttcatcgatgaaatcgatgcggtgggaaggaagagaggaagaggcaactttggagggcagagtgagcaggagaacacactcaaccagctgctggtggagatggatggttttaatacaacaacaaatgtcgtcattttggccggcaccaatcgaccagatatcctggaccccgcgctacttaggccggggcgtttcgacaggcagatctttattggaccaccagacataaaaggaagagcttctattttcaaagttcatctccgaccgctaaaactggacagtaccctggagaaggataaattggcaagaaaactggcatctttaactccagggttttcaggtgctgatgttgctaatgtctgtaatgaagctgcgttgattgctgcaaggcatctgtcagattccataaatcagaaacactttgaacaggcaattgagcgagtgattggtggcttagagaagaaaacgcaggttctgcagcctgaggagaagaagactgtggcataccacgaagcaggccatgcggttgccggctggtatctggagcacgcagacccgcttttaaaggtatccatcatcccacgtggcaaaggactaggttatgctcagtatttaccaaaagaacaatacctctataccaaagagcagctcttggataggatgtgtatgactttaggtggtcgagcctctgaagaaatcttctttggaagaattacaactggtgctcaagatgacttgagaaaagtaactcagagtgcatatgcccaaattgttcagtttggcatgaatgaaaaggttgggcaaatctcctttgacctcccacgtcagggggacatggtattggagaaaccttacagtgaagccactgcaagattgatagatgatgaagtacgaatacttattaatgatgcttataaaagaacagtagctcttctcacagaaaagaaagctgacgtggagaaggttgctcttctgttgttagaaaaagaagtattagataagaatgatatggttgaacttttgggccccagaccatttgcggaaaaatctacctatgaagaatttgtggaaggcactggcagcttggatgaggacacctcacttccagaaggccttaaggactggaacaaggagcgggaaaaggagaaagaggagcccccgggtgagaaagttgccaactagaggcccagagggaggccatctcagtctctccactgtggtttcagctggtgcattatttcagctgtggctttcagaagaatgggaatgctgcgctgattttagccagccactggcccagctgaaatgatggggaaaggagtccttagtcctttcagcctcagaggtcacagtgggtggcaggtgactttccggaggccttgagggaaatgcacactgtcccatagcctcattgggctcccagacgtgctggaaaggttgagcccagagtggccgaggctggaccctgtggcaccaagtggggtcggctgaccgtgtggcagggatcgttgcactggactcttggcgtgtgggaagggatgctttctctttgtcgcccactcttcattcctgtttctcctcagttcccctgtgcagatgggctgtgaaattaaattggagtcttgataagaacatttt

SEQ ID NO: 434 - DNA, 2099 bp, Homo sapiens
gcgtctgcgtagttcgctcacctccctttctaactccgctgccgccatggctcctgtgaaaaagcttgtggtgaaggggggcaaaaaaaagaagcaagttctgaagttcactcttgattgcacccaccctgtagaagatggaatcatggatgctgccaattttgagcagtttttgcaagaaaggatcaaagtgaacggaaaagctgggaaccttggtggaggggtggtgaccatcgaaaggagcaagagcaagatcaccgtgacatccgaggtgcctttctccaaaaggtatttgaaatatctcaccaaaaaatatttgaagaagaataatctacgtgactggttgcgcgtagttgctaacagcaaagagagttacgaattacgttacttccagattaaccaggacgaagaagaggaggaagacgaggattaaatttcatttatctggaaaattttgtatgagttcttgaataaaacttgggaaccaaaatggtggtttatccttgtatctctgcagtgtggattgaacagaaaattggaaatcatagtcaaagggcttcccttggttcgccactcatttatttgtaacttgacttctttttttttctgcttaaaaatttcaattctcgtggtaataccagagtagaaggagagggtgactttaccgaactgacagccattggggaggcagatgcgggtgtggaggtgtgggctgaaggtagtgactgtttgattttaaaaagtgtgactgtcagttgtatctgttgcttttctcaatgattcagggatacaaatgggcttctctcattcattaaaagaaaacgcgacatctttctaagattctctgtgggaaaatgactgtcaataaaatgcgggtttctgggccattcgtcttactttcattttttgattacaaatttctcttgacgcacacaattatgtctgctaatcctcttcttcctagagagagaaactgtgctccttcagtgttgctgccataaaggggtttggggaatcgattgtaaaagtcccaggttctaaattaactaaatgtgtacagaaatgaacgtgtaagtaatgtttctacaggtctttgcaacaaactgtcactttcgtctccagcagagggagctgtaggaatagtgcttccagatgtggtctcccgtgtggggcccagcaatgggggcccctgatgccaagagctctggaggttcttgaaagaggggacacgaaggaggagtgactgggaagcctcccatgccaaggaggtgggaggtgccctggaaatagctgcctcatgccacttaggccatgactggatttaatgtcagtggtgtgccacagtgcagaggctagacaactgaaaggggctaccaaggctgggaaaaaaatgcaattgttgctgtgagtgactttgaaagactctggtgccttgtggtgcccttctgaaattcaaacagtaatgcaaaagtgtctgcattagaatttacggtgtctaaaattcatgtttttaaaagagcttgcctacagatggtttccacacttgaaattgtgccctgcgagttgcatagctggaagttcaatgctcagtcctaccttggctcccattaaacatttggtgctctgtggattgagttgaacgtgttgaggctttgcaatttcacttgtgttaaaggctctggcatttttccatttctatgcaaatttctttgaagcagaattgcttgcatatttcttctctgccgtcacagaaagcagagtttctttcaaacttcactgaggcatcagttgctctttggcaatgtcccttaaccatgattattaactaagtttgtggcttgagtttacaaattctacttgttgcattgatgttcccatgtagtaagtcatttttagtttggttgtgaaaaaaccctgggctgaagttggcatttcagttaaaagaaaaaaagaaactagtcccagatttgaaaacttgtaataaaattgaaactcactggttttctatgtctttttgaactcttgtaatcgagttttgatcatattttctattaaagtggctaacacctggctactcttactgtaaaaaaaaaaaaaaa

SEQ ID NO: 435 - DNA, 4266 bp, Homo sapiens
ccgggctgtgagtctctcgccgccggaggaagatgaggctgaagattgggttcatcttacgcagtttgctggtggtgggaagcttcctggggctagtggtcctctggtcttccctgaccccgcggccggacgacccaagcccgctgagcaggatgagggaagacagagatgtcaatgaccccatgcccaaccgaggcggcaatggactagctcctggggaggacagattcaaacctgtggtaccatggcctcatgttgaaggagtagaagtggacttagagtctattagaagaataaacaaggccaaaaatgaacaagagcaccatgctggaggagattcccagaaagatatcatgcagaggcagtatctcacatttaagcctcagacattcacctaccatgatcctgtgcttcgcccagggatcctcggtaactttgaacccaaagaacctgagcctcctggagtggttggtggccctggagagaaagccaagccattggttttgggaccagaattcaaacaagcaattcaagccagcattaaagagtttggatttaacatggtggcaagtgacatgatctcactggaccgcaacgtcaatgacttacgccaagaagaatgcaagtattggcattatgatgaaaacttgctcacttcgagcgttgtcattgtcttccataatgaaggatggtcaaccctcatgagaacagtccacagtgtaattaaaaggactccaaggaaatatttagcagaaattgtgttaattgacgatttcagtaataaagaacacttaaaagaaaaactggatgaatatattaagctgtggaatggcctagtgaaggtatttcgaaatgaaagaagggaaggtttaattcaagcacgaagtattggtgctcagaaggctaaacttggacaggttttgatataccttgatgcccactgtgaagtggcagttaactggtatgcaccacttgtagctcccatatctaaggacagaaccatttgcactgtgccgcttatagatgtcataaatggcaacacatatgaaattataccccaagggggtggtgatgaagatgggtatgcccgaggagcatgggattggagtatgctctggaaacgggtgcctctgacccctcaagagaagagactgagaaaaacaaaaactgaaccgtatcggtccccagccatggctgggggattatgtgccattgaacgagagttcttctttgaattgggtctctatgatccaagtctccagatttggggtggtgaaaactttgagatctcatacaagatatggcagtgtggtggcaaattattatttgttccttgttctcgtgttggacatatctaccgtcttgagggctggcaaggaaatcctccgcccatttatgttgggtcttctccaactctgaagaattatgttagagttgtggaggtttggtgggatgaatataaagactacttctatgctagtcgtcctgaatcgcaggcattaccatatggggatatatcggagctgaaaaaatttcgagaagatcacaactgccaaagttttaagtggttcatggaagaaatagcttatgatatcacctcacactaccctttgccacccaaaaatgttgactggggagaaatcagaggcttcgaaactgcttactgcattgatagcatgggaaaaacaaatggaggctttgttgaactaggaccctgccacaggatgggagggaatcagcttttcagaatcaatgaagcaaatcaactcatgcagtatgaccagtgtttgacaaagggagctgatggatcaaaagttatgattacacactgtaatctaaatgaatttaaggaatggcagtacttcaagaacctgcacagatttactcatattccttcaggaaagtgtttagatcgctcagaggtcctgcatcaagtattcatctccaattgtgactccagtaaaacgactcaaaaatgggaaatgaataacatccatagtgtttagagagaaaaaaataaaccaataacctacctactgacaagtaaatttatacaggactgaaaaccgcctggaaacctgctgcaactattgttattaactctgtatagctccaaacctggaacctcctgatcagtttgaaggacattgataaactgtgattttacaataacattatcatctgcagttactgtttacaagactgctttttaccttaaactttgtagatgtttacatcttttttgttgtgttttaaagatgatgttggtaatttgtgccttttagctctgttttattaaacagagttaaagcatgttgtcttctttgggattacactcaggggttctgaaaggcagtttgatttttatttttaacacacttgaaaaaaggttggagtaaccagactttcatatataacttggtgattatcaacctgttgtgtctttatttaattttacatctttttgaagcactgccacaggttattagccaaggtggccttccttcacagtcatgctgcttttttgaaaggtgaatttcaacacatttagtgcctctttcatttctcagtatatatttcaagagcttgtgatgaaatctataggatggtaatgatggacttgtcacctgtatggggaatacttttactactcagaaatgaatttatgtgctgccatttgctataaagttgaactttgtatggcttgaaaaagaaatgaccatatggaacatcccaaggctgtcccataagggttggaagttgtgtagcattcactcccttacctactggcattcccagtgccctctgtccatacctacttctaggattgcaaagggagtcttccaactagaagaaaaattgtccactgacatttgggatttacttttctccaatacctgccaatacagaaaactattatcagttgttattgttatcccttgaaaagcgagggtgacaaaaacaacaaaacaccgttataaacacatcaaaggttcattctgactgaggtaagactttccaagcccttgttagattaggccttataaaacttgtgtgcattataacctaagctgtgcaacctggtgaagccaagagtgaactgatgtttcatttatattttcatccaaatgacattatctgcacgtttttaaaatttaaaaacaaaggactatttaaaaatacagtttattaacaaacgtgaaactactttctgttacattaggtgttccctagtgtttcttaatttctttttagaaagtgtatttttattagtatttttccggtgaacagaagatttgtttggatttaaacatttactaagacagtacctattaggaaaaccaaatattgcaaatggtcaattcgattttaatttctcaaaagatactctgttatccagaagattaaaatgcctacattgagtgcttaaaaaaaaaaacaactgtgatgatgtgagcagaatggcaagtaagttaagcatttttgatcctgtaatcatggtatcattacaatgaaaggaattcacaaactactgccagaggaagtttgttttttaatttaagagggaaatataacctataaatttgtttcttccaagcttagctcttaaatttgggagactcaaagttaaacatcctcaacagagttttatttataattttgaattgtcaatttgtattttgctactgatctgtgatcaaccattttaactttcatctctagggatgtttaacatttataattgcaaaataaaccaactataaaaaaagaaactaagagagaattggtactttaattacttgtgtgtttgcaaataggctccattttccatgttgagtagattataaccttattaactaggcataggcctaagaaaggtggcaatgaactgtgcatgtaaattttaaatgggtactttgtgcaattcgttaaaagaagatactctatgaatatgattctatatattgaaatcagaaaacctaccaaacaaaaacatcagaagctgctgccataatgactattttctactgtaggctgctttggaaataattcccatatccttgctttgtaagttggtaatatcactatgcatttctacacattttataaatttgatttatgcagattttgatacactgtatgtttctgtagaaattgtataaatattcaaaattttattaggataaatttgagaaacttacgtatatcttaattctgggttgcttgttttttaggtgacaaaaataaaatattgtattttaattc

SEQ ID NO: 436 - DNA, 2276 bp, Homo sapiens
cctgtgtgctggggaggaatcccgcagtggccggggggcttgaggccgctgctttgtctcttcgtccagagccttatgtaagagcttttctcgggaaacaggaagtcctgcttgccaatttcagcacagggagtagtgcaggccttattccaacacacccggcccagccttaaccccagaactcagccagtttcttgcttccgtgcccctggttctcctccccatcgagcccacccctcctttcccaccttcagtcacccctagtgaactgccccagcgatctctgctgtgcttgaccccgagggtcttccaccctcgccctgaccctggacactgcccagcttggccccccatcctgctcctggcacaatgccctctagccagccaaccttccctcccccaaccctggggccgccccagggttcctgcgcactgcctgttcctcctgggtgtcactggcagccctgtccttcctagagggactggaacctaattctcctgaggctgagggagggtggagggtctcaaggcaacgctggccccacgacggagtgccaggagcactaacagtacccttagcttgctttcctcctccctcctttttattttcaagttcctttttatttctccttgcgtaacaaccttcttcccttctgcaccactgcccgtacccttacccgccccgccacctccttgctaccccactcttgaaaccacagctgttggcagggtccccagctcatgccagcctcatctcctttcttgctagcccccaaagggcctccaggcaacatggggggcccagtcagagagccggcactctcagttgccctctggttgagttggggggcagctctgggggccgtggcttgtgccatggctctgctgacccaacaaacagagctgcagagcctcaggagagaggtgagccggctgcaggggacaggaggcccctcccagaatggggaagggtatccctggcagagtctcccggagcagagttccgatgccctggaagcctgggagaatggggagagatcccggaaaaggagagcagtgctcacccaaaaacagaagaagcagcactctgtcctgcacctggttcccattaacgccacctccaaggatgactccgatgtgacagaggtgatgtggcaaccagctcttaggcgtgggagaggcctacaggcccaaggatatggtgtccgaatccaggatgctggagtttatctgctgtatagccaggtcctgtttcaagacgtgactttcaccatgggtcaggtggtgtctcgagaaggccaaggaaggcaggagactctattccgatgtataagaagtatgccctcccacccggaccgggcctacaacagctgctatagcgcaggtgtcttccatttacaccaaggggatattctgagtgtcataattccccgggcaagggcgaaacttaacctctctccacatggaaccttcctggggtttgtgaaactgtgattgtgttataaaaagtggctcccagcttggaagaccagggtgggtacatactggagacagccaagagctgagtatataaaggagagggaatgtgcaggaacagaggcgtcttcctgggtttggctccccgttcctcacttttcccttttcattcccaccccctagactttgattttacggatatcttgcttctgttccccatggagctccgaattcttgcgtgtgtgtagatgaggggcgggggacgggcgccaggcattgtccagacctggtcggggcccactggaagcatccagaacagcaccaccatctagcggccgctcgagggaagcacccgccggttggccgaagtccacgaagccgccctctgctagggaaaacccctggttctccatgccacacctctctccaggtgccctctgcctcttcaccccacaagaagccttatcctacgtccttctctccatctatcggaccccagtttccatcactatctccagagatgtagctattatgcgcccgtctacagggggtgcccgacgatgacggtgccttcgcagtcaaattactcttcgggtcccaaggtttggctttcacgcgctccattgccccggcgtggcaggccattccaagcccttccgggctggaactggtgtcggaggagcctcgggtgtatcgtacgccctggtgttggtgttgcctcactcctctgagctcttctttctgatcaagccctgcttaaagttaaataaaatagaatgaatgataaaaaaaaaaaaaaa

SEQ ID NO: 437 - DNA, 3124 bp, Homo sapiens
taagatccacatcagctcaactgcacttgcctcgcagaggcagcccgctcacttcccgcggaggcgctccccggcgccgcgctccgcggcagccgcctgcccccggcgctgcccccgcccgccgcgccgccgccgccgccgcgcacgccgcgccccgcagctctgggcttcctcttcgcccgggtggcgttgggcccgcgcgggcgctcgggtgactgcagctgctcagctcccctcccccgccccgcgccgcgcggccgcccgtcgcttcgcacagggctggatggttgtattgggcagggtggctccaggatgttaggaactgtgaagatggaagggcatgaaaccagcgactggaacagctactacgcagacacgcaggaggcctactcctccgtcccggtcagcaacatgaactcaggcctgggctccatgaactccatgaacacctacatgaccatgaacaccatgactacgagcggcaacatgaccccggcgtccttcaacatgtcctatgccaacccgggcctaggggccggcctgagtcccggcgcagtagccggcatgccggggggctcggcgggcgccatgaacagcatgactgcggccggcgtgacggccatgggtacggcgctgagcccgagcggcatgggcgccatgggtgcgcagcaggcggcctccatgaatggcctgggcccctacgcggccgccatgaacccgtgcatgagccccatggcgtacgcgccgtccaacctgggccgcagccgcgcgggcggcggcggcgacgccaagacgttcaagcgcagctacccgcacgccaagccgccctactcgtacatctcgctcatcaccatggccatccagcaggcgcccagcaagatgctcacgctgagcgagatctaccagtggatcatggacctcttcccctattaccggcagaaccagcagcgctggcagaactccatccgccactcgctgtccttcaatgactgcttcgtcaaggtggcacgctccccggacaagccgggcaagggctcctactggacgctgcacccggactccggcaacatgttcgagaacggctgctacttgcgccgccagaagcgcttcaagtgcgagaagcagccgggggccggcggcgggggcgggagcggaagcgggggcagcggcgccaagggcggccctgagagccgcaaggacccctctggcgcctctaaccccagcgccgactcgcccctccatcggggtgtgcacgggaagaccggccagctagagggcgcgccggcccccgggcccgccgccagcccccagactctggaccacagtggggcgacggcgacagggggcgcctcggagttgaagactccagcctcctcaactgcgccccccataagctccgggcccggggcgctggcctctgtgcccgcctctcacccggcacacggcttggcaccccacgagtcccagctgcacctgaaaggggacccccactactccttcaaccacccgttctccatcaacaacctcatgtcctcctcggagcagcagcataagctggacttcaaggcatacgaacaggcactgcaatactcgccttacggctctacgttgcccgccagcctgcctctaggcagcgcctcggtgaccaccaggagccccatcgagccctcagccctggagccggcgtactaccaaggtgtgtattccagacccgtcctaaacacttcctagctcccgggactggggggtttgtctggcatagccatgctggtagcaagagagaaaaaatcaacagcaaacaaaaccacacaaaccaaaccgtcaacagcataataaaatcccaacaactatttttatttcatttttcatgcacaacctttcccccagtgcaaaagactgttactttattattgtattcaaaattcattgtgtatattactacaaagacaaccccaaaccaatttttttcctgcgaagtttaatgatccacaagtgtatatatgaaattctcctccttccttgcccccctctctttcttccctctttcccctccagacattctagtttgtggagggttatttaaaaaaacaaaaaaggaagatggtcaagtttgtaaaatatttgtttgtgctttttccccctccttacctgaccccctacgagtttacaggtctgtggcaatactcttaaccataagaattgaaatggtgaagaaacaagtatacactagaggctcttaaaagtattgaaagacaatactgctgttatatagcaagacataaacagattataaacatcagagccatttgcttctcagtttacatttctgatacatgcagatagcagatgtctttaaatgaaatacatgtatattgtgtatggacttaattatgcacatgctcagatgtgtagacatcctccgtatatttacataacatatagaggtaatagataggtgatatacatgatacattctcaagagttgcttgaccgaaagttacaaggaccccaacccctttgtcctctctacccacagatggccctgggaatcaattcctcaggaattgccctcaagaactctgcttcttgctttgcagagtgccatggtcatgtcattctgaggtcacataacacataaaattagtttctatgagtgtataccatttaaagaatttttttttcagtaaaagggaatattacaatgttggaggagagataagttatagggagctggatttcaaaacgtggtccaagattcaaaaatcctattgatagtggccattttaatcattgccatcgtgtgcttgtttcatccagtgttatgcactttccacagttggacatggtgttagtatagccagacgggtttcattattatttctctttgctttctcaatgttaatttattgcatggtttattctttttctttacagctgaaattgctttaaatgatggttaaaattacaaattaaattgttaatttttatcaatgtgattgtaattaaaaatattttgatttaaataacaaaaataataccagattttaagccgtggaaaatgttcttgatcatttgcagttaaggactttaaataaatcaaatgttaacaaaaaaaaaaaaaaaa

SEQ ID NO: 438 - DNA, 1792 bp, Homo sapiens
ataggtggctgcagaggcgaggtgacggcgcgtgcggaacgaactctgcacccccaggaatggggagcgctggcttttccgtgggaaaattccacgtggaggtggcctctcgcggccgggaatgtgtctcggggacgcccgagtgtgggaatcggctcgggagtgcgggcttcggggatctctgcttggaactcagaggcgctgacccagcctggggcccgtttgctgcccacgggaggagccgccgtcagggctcgagatttctgtggctcctcaagatattggtcataatcctggtacttggcattgttggatttatgttcggaagcatgttccttcaagcagtgttcagcagccccaagccagaactcccaagtcctgccccgggtgtccagaagctgaagcttctgcctgaggaacgtctcaggaacctcttttcctacgatggaatctggctgttcccgaaaaatcagtgcaaatgtgaagccaacaaagagcagggaggttacaactttcaggatgcctatggccagagcgacctcccagcggtgaaagcgaggagacaggctgaatttgaacactttcagaggagagaagggctgccccgcccactgcccctgctggtccagcccaacctcccctttgggtacccagtccacggagtggaggtgatgcccctgcacacggttcccatcccaggcctccagtttgaaggacccgatgcccccgtctatgaggtcaccctgacagcttctctggggacactgaacacccttgctgatgtcccagacagtgtggtgcagggcagaggccagaagcagctgatcatttctaccagtgaccggaagctgttgaagttcattcttcagcacgtgacatacaccagcacggggtaccagcaccagaaggtagacatagtgagtctggagtccaggtcctcagtggccaagtttccagtgaccatccgccatcctgtcatacccaagctatacgaccctggaccagagaggaagctcagaaacctggttaccattgctaccaagactttcctccgcccccacaagctcatgatcatgctccggagtattcgagagtattacccagacttgaccgtaatagtggctgatgacagccagaagcccctggaaattaaagacaaccacgtggagtattacactatgccctttgggaagggttggtttgctggtaggaacctggccatatctcaggtcaccaccaaatacgttctctgggtggacgatgattttctcttcaacgaggagaccaagattgaggtgctggtggatgtcctggagaaaacagaactggacgtggtaggcggcagtgtgctgggaaatgtgttccagtttaagttgttgctggaacagagtgagaatggggcctgccttcacaagaggatgggatttttccaacccctggatggcttccccagctgcgtggtgaccagtggcgtggtcaacttcttcctggcccacacggagcgactccaaagagttggctttgatccccgcctgcaacgagtggctcactcagaattcttcattgatgggctagggaccctactcgtggggtcatgcccagaagtgattataggtcaccagtctcggtctccagtggtggactcagaactggctgccctagagaagacctacaatacataccggtccaacaccctcacccgggtccagttcaagctggccctccactacttcaagaaccatctccaatgtgccgcataaaggtgtgagggcataggagaaacactaggctg

SEQ ID NO: 439 - DNA, 761 bp, Homo sapiens
ggcggcaggaccagcatgcaccaccgaaacgactcccagaggctggggaaagctggctgcccgccagagccgtcgttgcaaatggcaaatactaatttcctctccaccttatcccctgaacactgcagacctttggcgggggaatgcatgaacaagctcaaatgcggcgctgctgaagcagagataatgaatctccccgagcgcgtggggactttttccgctatcccggctttagggggcatctcattacctccaggggtcatcgtcatgacagcccttcactcccccgcagcagcctcagcagccgtcacagacagtgcgtttcaaattgccaatctggcagactgcccgcagaatcattcctcctcctcctcgtcctcctcagggggagctggcggagccaacccagccaagaagaagaggaaaaggtgtggggtctgcgtgccctgcaagaggctcatcaactgtggcgtctgcagcagttgcaggaaccgcaaaacgggacaccagatctgcaaatttagaaaatgtgaagagctaaagaaaaaacctggcacttcactagagagaacacctgttcccagcgctgaagcattccgatggttcttttaaagcagtagtatatcttattttcaaggcatttggaaatgaagggcaaactaatgtcttgttttaagaaactgcttagtccaccactgaagaaaatatccagaaattattttcattttatgtatagggatttcttcaaaaaaaaaaaaaaa

SEQ ID NO: 440 - DNA, 4698 bp, Homo sapiens
ccgccgccactgccgtcgggtaaggtcccagcacggacatggcctcgcgcggcgcccgcccgggcccgagtcccccgcgccccgctttgtagccccccggcggagaggcggcctcgacggtgcggacggcgcagacggccgggcgggcggcatggaggcggcgcatctgctcccggccgccgacgtgctgcgccacttctcggtgacagccgagggcggcctgagcccggcgcaggtgaccggcgcgcgggagcgctacggccccaacgagctcccgagtgaggaagggaagtccctgtgggagctggtgctggaacagtttgaggacctcctggtgcgcatcctgctgctggctgcccttgtctcctttgtcctggcctggttcgaggagggcgaggagaccacgaccgccttcgtggagcccctggtcatcatgctgatcctcgtggccaacgccattgtgggcgtgtggcaggaacgcaacgccgagagtgccatcgaggccctgaaggagtatgagcctgagatgggcaaggtgatccgctcggaccgcaagggcgtgcagaggatccgtgcccgggacatcgtcccaggggacattgtagaagtggcagtgggggacaaagtgcctgctgacctccgcctcatcgagatcaagtccaccacgctgcgagtggaccagtccatcctgacgggtgaatctgtgtccgtgaccaagcacacagaggccatcccagaccccagagctgtgaaccaggacaagaagaacatgctgttttctggcaccaatatcacatcgggcaaagcggtgggtgtggccgtggccaccggcctgcacacggagctgggcaagatccggagccagatggcggcagtcgagcccgagcggacgccgctgcagcgcaagctggacgagtttggacggcagctgtcccacgccatctctgtgatctgcgtggccgtgtgggtcatcaacatcggccacttcgccgacccggcccacggtggctcctggctgcgtggcgctgtctactacttcaagatcgccgtggccctggcggtggcggccatccccgagggcctcccggctgtcatcactacatgcctggcactgggcacgcggcgcatggcacgcaagaacgccatcgtgcgaagcctgccgtccgtggagaccctgggctgcacctcagtcatctgctccgacaagacgggcacgctcaccaccaatcagatgtctgtctgccggatgttcgtggtagccgaggccgatgcgggctcctgccttttgcacgagttcaccatctcgggtaccacgtatacccccgagggcgaagtgcggcagggggatcagcctgtgcgctgcggccagttcgacgggctggtggagctggcgaccatctgcgccctgtgcaacgactcggctctggactacaacgaggccaagggtgtgtatgagaaggtgggagaggccacggagacagctctgacttgcctggtggagaagatgaacgtgttcgacaccgacctgcaggctctgtcccgggtggagcgagctggcgcctgtaacacggtcatcaagcagctgatgcggaaggagttcaccctggagttctcccgagaccggaaatccatgtccgtgtactgcacgcccacccgccctcaccctactggccagggcagcaagatgtttgtgaagggggctcctgagagtgtgatcgagcgctgtagctcagtccgcgtggggagccgcacagcacccctgacccccacctccagggagcagatcctggcaaagatccgggattggggctcaggctcagacacgctgcgctgcctggcactggccacccgggacgcgcccccaaggaaggaggacatggagctggacgactgcagcaagtttgtgcagtacgagacggacctgaccttcgtgggctgcgtaggcatgctggacccgccgcgacctgaggtggctgcctgcatcacacgctgctaccaggcgggcatccgcgtggtcatgatcacgggggataacaaaggcactgccgtggccatctgccgcaggcttggcatctttggggacacggaagacgtggcgggcaaggcctacacgggccgcgagtttgatgacctcagccccgagcagcagcgccaggcctgccgcaccgcccgctgcttcgcccgcgtggagcccgcacacaagtcccgcatcgtggagaacctgcagtcctttaacgagatcactgctatgactggcgatggagtgaacgacgcaccagccctgaagaaagcagagatcggcatcgccatgggctcaggcacggccgtggccaagtcggcggcagagatggtgctgtcagatgacaactttgcctccatcgtggctgcggtggaggagggccgggccatctacagcaacatgaagcaattcatccgctacctcatctcctccaatgttggcgaggtcgtctgcatcttcctcacggcaattctgggcctgcccgaagccctgatccctgtgcagctgctctgggtgaacctggtgacagacggcctacctgccacggctctgggcttcaacccgccagacctggacatcatggagaagctgccccggagcccccgagaagccctcatcagtggctggctcttcttccgatacctggctatcggagtgtacgtaggcctggccacagtggctgccgccacctggtggtttgtgtatgacgccgagggacctcacatcaacttctaccagctgaggaacttcctgaagtgctccgaagacaacccgctctttgccggcatcgactgtgaggtgttcgagtcacgcttccccaccaccatggccttgtccgtgctcgtgaccattgaaatgtgcaatgccctcaacagcgtctcggagaaccagtcgctgctgcggatgccgccctggatgaacccctggctgctggtggctgtggccatgtccatggccctgcacttcctcatcctgctcgtgccgcccctgcctctcattttccaggtgaccccactgagcgggcgccagtgggtggtggtgctccagatatctctgcctgtcatcctgctggatgaggccctcaagtacctgtcccggaaccacatgcacgaagaaatgagccagaagtgagcgctgggaacagagtggagtctccggtgtgtacctcagactgatggtgcccatgtgttcgcctccgccccccacccttgccaccacactcgcccacttgcccaccgggtcccgccggataaatgacaggcccgaggtcagaatggccatccccgggccccgtcctggggtctctgtccccacttccttctggcctgggaggtctgtaattcctgtctcctggactctcctgggaagttccctgctctgcagctctggcccaggagctgcaggctgggagggggcagccaagaagccggagctggcagcatacccagagatccggggcccccccacccccaaatcacgagtgcagctggagcttgctcccccttgttcggaagctggacgttcacttggtgactggtgcctctgcactgacggaggactctgggggtccttcttaccggctctgacctctctcttcgtgcctggtctgggactgggtcagccctgggggatcagaaggggccatctgggcccagctgtgtacagcgagggtgggcagccccctccactccactctgcttccacaaagtcggctcccgagagctcgaggctgcttctgtttatatgtgcagggcccgggcgggtgaagggtcagagagacggacacaaggagccggcaggagggcggagcgaggatgtcctttcccgggagacaagtcgggaaagcctggctggactgcctcagccccgcgcgcctcctggactcagggttccccgtcctgagctcgggagatgttcagagtcacactgccgcccggtctgccacgcagaggtccaacttgccacccgcgtccctggtacctgagaccaccgacatcctcaggttcctgaccgtggcgcccttctacccagcccagtgtgcggccgccgcgctgtctgcacagctgggggcctctgagcctggtgggcttcctggactcttggcctcactccttgccccctccccacgacacccatgagccgaaaggatgtcactaaggatggctgattccccaagggcacccgctctccctccctccctgctggaggaacacgtcatatcagatgagaggaagatggcctctgatggacagaatttttctcttaactcagcttttgctactttggcaaaaactagcgaggggtagcagaaacctgcaccaaggattgtccctatgtcttggccactcctagagcgtgtgcagactgatgattttatatgtaaatcaagactcacatccctttcctagtcccccacatccaaagcccctcagcctgccttgcagaccaatgggctccatgttctgtagccccctcccctacgcctcacccctcctccctctcacaggttctgggcggccagtgagagaaacgcagtgggggaggcagggagtctggtgcctgcagagattctctgcttctttcctggggggaggtggggaggtcttagcaggagcgggccctgtacccacctgctgacctgctgtttggtagagaaataaaggttgtgtgactggggg

SEQ ID NO: 441 - DNA, 3347 bp, Homo sapiens; identical to SEQ ID NO: 296

SEQ ID NO: 442 - DNA, 1518 bp, Homo sapiens
ggtggcgctgttacatagcccgtagtcagaggcctttcagcccaggggccggcgcacgaaacctgtttggaggttatggatgataaacccaatcctgaagccctaagtgacagttcagagcgtcttttctcctttggcgtcatcgcagatgttcaatttgcagacttagaagatggctttaatttccaaggaaccaggcggcgatactacagacatagtcttcttcacttacagggtgccattgaagactggaataatgaaagcagcatgccctgttgtgtccttcagcttggagatatcatcgatggatataatgcacagtataatgcatccaaaaagtccctagaacttgttatggacatgttcaagaggcttaaagttccagttcatcatacatggggaaaccatgaattctataacttcagtagagagtatttaacacactctaaacttaacactaagtttctagaagatcagattgtacatcatcctgagaccatgccttcagaagattattatgcttatcattttgtaccattccctaaattccggttcattttacttgatgcatatgacttgagtgtcttgggcgtggatcagtcttctccaaaatacgagcagtgtatgaagatattgagggagcacaatccaaatacggaactgaatagtcctcaaggactttctgagccccagtttgtccagtttaatggaggattcagccaagaacagctaaactggttgaatgaagtgctaacattctctgacacaaaccaagaaaaggtggtgattgtgagccatcttcccatttacccggacgcctctgacaatgtgtgcctggcctggaactacagagatgccctggcagtcatttggtctcatgagtgtgtggtgtgtttctttgctggtcacacccatgatggtggctactctgaggatccttttggtgtataccacgtcaacctagaaggagttattgaaacagctccagacagccaagcctttggcacagttcatgtctatcctgacaaaatgatgttgaaagggagaggcagagttccagatagaattatgaattacaagaaagaaagagccttccattgttagtctaatttattttaacttgatagaaaatgagctttgtgtttgtccctcctaaacaaaaaaataaaaatcctctgtctcattgtttagtattcagcttgcataacaaaatgtatttatagtttcagtgtgtgatggttgataaaatactcagaaatgttattttggatcatgtatccattgtaagttagaaacaaaccagggaggaaactgaggcaggggtgtatagtcctcataaggggcatatagtcctcatgagggatcttatttggccctacctgattttttttaactttttacaaggagattgtattcacatgtgttaactatgtaacttcaagttcagcatataagctcaggtaagctttttctattcaccctgctgtgtaaatgagctttggacaatttctgctcaga

SEQ ID NO: 443 - DNA, 1766 bp, Homo sapiens
cggtcaggtccagcacttgggagctgactgtgctggaggtgacaggctttgcggggtccgcctgtgtgcaggagtcgcaaggtcgctgagcaggacccaaaggtggcccgaggcagccgggatgacagctctccccaggaatcctgctgcctgctgagaaacatggtcagcaagtcccgctggaagctcctggccatgttggctctggtcctggtcgtcatggtgtggtattccatctcccgggaagacagtttttattttcccatcccagagaagaaggagccgtgcctccagggtgaggcagagagcaaggcctctaagctctttggcaactactcccgggatcagcccatcttcctgcggcttgaggattatttctgggtcaagacgccatctgcttacgagctgccctatgggaccaaggggagtgaggatctgctcctccgggtgctagccatcaccagctcctccatccccaagaacatccagagcctcaggtgccgccgctgtgtggtcgtggggaacgggcaccggctgcggaacagctcactgggagatgccatcaacaagtacgatgtggtcatcagattgaacaatgccccagtggctggctatgagggtgacgtgggctccaagaccaccatgcgtctcttctaccctgaatctgcccacttcgaccccaaagtagaaaacaacccagacacactcctcgtcctggtagctttcaaggcaatggacttccactggattgagaccatcctgagtgataagaagcgggtgcgaaagggtttctggaaacagcctcccctcatctgggatgtcaatcctaaacagattcggattctcaaccccttcttcatggagattgcagctgacaaactgctgagcctgccaatgcaacagccacggaagattaagcagaagcccaccacgggcctgttggccatcacgctggccctccacctctgtgacttggtgcacattgccggctttggctacccagacgcctacaacaagaagcagaccattcactactatgagcagatcacgctcaagtccatggcggggtcaggccataatgtctcccaagaggccctggccattaagcggatgctggagatgggagctatcaagaacctcacgtccttctgacctgggcaagagctgtagcctgtcggttgcctactctgctgtctgggtgacccccatgcgtggctgtgggggtggctggtgccagtatgacccacttggactcaccccctcttggggagggagttctgggcctggccaggtctgagatgaggccatgcccctggctgctcttatggagccgagatccagtcagggtgggggcgctggagccgtgggagcccggccagggcagggggctcgtcgctgtggcaccccctctctgccagcaccaagagattatttaatgggctatttaattaaggggtaggaaggtgctgtgggctggtcccacacatccaggaaagaggccagtagagaattctgcccactttttataaaaacttacagcgatggccccaccaaggcctagacacggcactggcctcccaggagggcaggggcattgggaatgggtgggtgccctccagagaggggctgctacctcccagcaggcatgggaagagcactggtgtgggggttccaccgagaaggggacctcatctagaaaagaggttacaaacctaccattaaactatttttcctaaaacggaaaaaaaaaaaaaaaaaaaaaaaaa

SEQ ID NO: 444 - DNA, 4284 bp, Homo sapiens
ggccaaggcggcgaccggagcgcgatggcgggggcggcgggactcacggcagaagtgagctggaaggtcttggagcgaagagctcggaccaagcgctcaggctcagtttatgaacctcttaaaagcattaatcttccaagacctgataatgaaactctctgggataagttggaccattattacagaattgtcaagtcaacattgctgctgtatcaaagtccaactaccggtctctttcccactaaaacatgcggtggtgaccagaaggccaagatccaggacagcctatactgcgctgctggggcctgggctttggctcttgcatacaggcgaattgatgatgacaagggaaggacccatgagctggagcactcagctataaaatgcatgagaggaattctctactgctatatgcgtcaggccgataaggtccagcagtttaagcaggatccacgcccaacaacatgtcttcactctgttttcaatgtgcatacaggagatgagttgctttcctatgaggaatatggtcatcttcagataaatgcagtgtcactttatctcctttaccttgtggaaatgatttcctcaggactccagattatctacaacactgatgaggtctcttttattcaaaaccttgtattttgtgtggaaagagtttaccgtgtgcctgactttggtgtctgggaaagaggaagcaaatataataatggcagcacagagctacattcgagctcggttggtttagcaaaagcagctctagaagcaattaatggattcaacctttttggcaaccagggctgttcgtggtcagttatatttgtggatctcgatgctcacaatcgcaacaggcaaactttgtgctcgctgttacccagagaatcaagatcacataatacagatgctgccctgctcccctgcatcagttatcctgcatttgccctggatgatgaagttctttttagccagacacttgataaagtggttagaaaattaaaaggaaaatatggatttaaacgtttcttgagagatgggtatagaacatcattggaagatcccaacagatgctactacaagccagctgaaattaagctatttgatggcattgaatgtgaatttcccatatttttcctttatatgatgattgatggagtttttagaggcaatcctaagcaagtacaggaatatcaggatcttttgactccagtacttcatcataccacagaaggatatcctgttgtaccaaagtactattatgtgccagctgactttgtagaatatgaaaaaaataaccctggtagtcaaaaacgatttcctagcaactgtggccgtgatggaaaactgtttctttggggacaagcactttatatcatcgcaaaactcctggctgatgaacttattagtcctaaagacattgatcctgtccagcgctatgtcccactaaaggatcaacgtaacgtgagcatgaggttttccaatcagggcccactggaaaatgacttggtagttcatgtggcacttatagcagaaagccaaagacttcaagtttttctgaacacatatggtattcaaactcaaactcctcaacaagtagaacccattcagatatggcctcagcaggagcttgtgaaagcttatttgcagctgggtatcaatgaaaagttaggactctctggaaggccagacaggcccattggctgcctcgggacatcaaagatttatcgcattctaggaaagactgtggtttgttacccgattattttcgacctaagtgatttctacatgtctcaggatgttttcctgctgatagatgacataaagaatgcgctgcagttcattaaacaatattggaaaatgcatggacgtccacttttccttgttctcatccgggaagacaatataagaggtagccggttcaaccccatattagatatgctggcagcccttaaaaaaggaataattggaggagtcaaagttcatgtggatcgtctacagacactaatatctggagctgtggtagaacaacttgatttcctacgaatcagtgacacagaagagcttccagaatttaagagttttgaggaactagaacctcccaaacattcaaaagtcaaacggcaaagcagcacccctagtgctcctgaactgggacagcagccggatgtcaacattagtgaatggaaggacaaacccacccacgaaattcttcaaaaactgaatgattgcagttgtctggctagccaagccatcctgctgggtatactgctcaaaagagaaggccccaacttcatcacaaaggaaggtaccgtttctgatcacattgagagagtctatagaagagctggcagccaaaaactttggttggcggtgcgctacggggctgcatttacccagaaattttcttcctctatagccccacacattactacttttctggtacatgggaaacaggtaactctgggtgcctttgggcatgaagaagaagttatctctaatcctttgtctccaagagtgattcaaaacatcatctattataagtgtaacacccatgatgagagggaagcggtcattcagcaagaactggtcatccatattggctggatcatctccaataaccctgagttattcagtggcatgctgaaaatacgaatcgggtggatcatccatgccatggagtatgaacttcagatccgtggcggagacaagccagccttggacttgtatcagctgtcacctagtgaagttaaacagcttctgctggatattctgcagcctcaacagaatggaagatgttggctgaacaggcgtcagatcgatgggtctttgaatagaactcccaccgggttctatgaccgagtgtggcagattctggagcgcacgcccaatgggatcattgttgctgggaagcatttgcctcagcaaccaaccctgtcagatatgaccatgtatgagatgaatttctctctccttgttgaagacacgttgggaaatattgaccagccacagtacagacagatcgttgtagagttacttatggttgtatccattgtactggaaagaaaccccgagctagaatttcaagacaaagtagatctagacagactggtcaaagaagcatttaatgaatttcaaaaagatcagagtcggctaaaggaaattgaaaaacaagatgacatgacttccttttacaacactcctcccctgggaaaaagaggaacatgcagctatttgacaaaggcggtgatgaatctgctgctggaaggagaagtcaagccaaacaatgatgacccgtgtctgattagctagtggggaaggtgtaggaagctctgttgagacacatgttctgaagtgtgttgtgtttcatgttcaagcttaatcaaggcagccattaatatacgaactgagcatgctggggaggtgaatgccacatccttggcggggttatggacctcttgcatgtcatagccaatctaacggtaatggtaaatgcttttaatcaagcaggaaaaagttctcatgattatgccaactataatagtaatcctcactgagtgataaaaatagtttatgaattgaaaatttgccgctgcatgttgtatgatcaaatagttcatcaaaatgaatctttgctctttggactgaattcttaccatactgccattaaaataaatttgccaactagtaatgcatactggaaatcaaaagatactgaaagaatggtgaacttctcttagtggtattgtcatgctaaaagatgttaatatacatcataaaagcaaagtcagccagctgatattttggttctcaaaaactgcattattaataatattttagtatacagagctattctacagtttttacattgtaaacatgactgtggttttgtatttgctaaatataggggttggactaaaatataataaatctgtaccttatcaaacattttctttgagctcctgctaaaaataggacatgtctatgattgttcaaaaatatgttaaatttaggctcagcacagtagctcacacctgaaatcttagcacttcgggaggctgaggcaggtggatcacttgaggttaggagttcaagaccagcccagccaacatggtgaaaaccctgtctctactaaaaatacaaaaattagccaggcatgatggtgcatgccttttaaacccagctactgaggaggctgaggcatgagaattgcttgaaccaggagacggaggttgcagtgagctgaaatcctgccactgcacaccagcctgggtgacagagcgagactcc

SEQ ID NO: 445 - DNA, 6671 bp, Homo sapiens
aatgagatcctaagatggcggtggctgcggcggttggcgctgcgtagctgaggtcgaaaaggcggccactggggccgaggcagccaggaaacgtgtgggcctctctgctgcggtctccgagggccgaccgctgccggcggcgggtcgtgggggctgactgtcgctctgcctttgacaggagaggctgcttcttgtagaggaaacagctttgaagtgtggagcgggaaaggagcagtttctgagctgcaaaaactagtttctaaacagagagttaattgttaaatccagtatggccacaggaggaggtccctttgaagatggcatgaatgatcaggatttaccaaactggagtaatgagaatgttgatgacaggctcaacaatatggattggggtgcccaacagaagaaagcaaatagatcatcagaaaagaataagaaaaagtttggtgtagaaagtgataaaagagtaaccaatgatatttctccggagtcgtcaccaggagttggaaggcgaagaacaaagactccacatacgttcccacacagtagatacatgagtcagatgtctgtcccagagcaggcagaattagagaaactgaaacagcggataaacttcagtgatttagatcagagaagcattggaagtgattcccaaggtagagcaacagctgctaacaacaaacgtcagcttagtgaaaaccgaaagcccttcaactttttgcctatgcagattaatactaacaagagcaaagatgcatctacaagtcccccaaacagagaaacgattggatcagcacagtgtaaagagttgtttgcttctgctttaagtaatgacctcttgcaaaactgtcaggtgtctgaagaagatgggaggggagaacctgcaatggagagcagccagattgtaagcaggcttgttcaaattcgcgattatattactaaagctagttccatgcgggaagatcttgtagagaaaaatgagagatctgctaatgttgagcgccttactcatctaatagatcaccttaaagaacaagagaagtcatatatgaaatttcttaaaaaaatccttgccagagatcctcagcaggagcctatggaagagatagaaaatttgaagaaacaacatgatttattaaaaagaatgttacaacagcaggagcaactaagagctctacagggacggcaggctgcacttctagctctgcaacataaagcagagcaagctattgcagtgatggatgattctgttgttgcagaaactgcaggtagcttatctggcgtcagtatcacatctgaactaaatgaagaattgaatgacttaattcagcgttttcataatcagcttcgtgattctcagcctccagctgttccagacaatagaagacaggcagaaagtctttcattaactagggaggtttcccagagcaggaaaccatcagcttcagaacgtttacctgatgagaaagtcgaactttttagcaaaatgagagtgctacaggaaaagaaacaaaaaatggacaaattgcttggagaacttcatacacttcgagatcagcatcttaacaattcatcatcctctccacaaaggagtgtcgatcagagaagtacttcagctccctctgcttctgtaggcttggcaccggttgtcaatggagaatccaatagcctcacatcatctgttccttatcctactgcttctctagtatctcagaatgagagtgaaaacgaaggccacctcaatccatctgaaaaactccagaagttaaatgaagttcgaaagagattgaatgagctaagagaattagttcattattatgaacaaacgtcagacatgatgacagatgctgtgaatgaaaacaggaaagatgaagaaactgaagagtcagaatatgattctgagcatgaaaattccgagcctgttactaacattcgaaatccacaagtagcttccacttggaatgaagtaaatagtcatagtaatgcacagtgtgtttctaataatagagatgggcgaacagttaattctaattgtgaaattaacaacagatctgctgccaacataagggctctaaacatgcctccttctttagattgtcgatataatagagaaggggaacaggagattcatgttgcacaaggtgaagatgatgaggaggaggaggaagaagcagaagaggagggagtcagtggagcttcattatctagtcacaggagcagtctggttgatgagcatccagaagatgctgaatttgaacagaagatcaaccgacttatggctgcaaaacagaaacttagacagttacaagatcttgttgctatggtacaggatgatgatgcagctcaaggagttatctctgccagtgcatcaaatttggatgatttctacccagcagaagaagacaccaagcaaaattcaaataacactagaggaaatgccaataaaacacagaaagatactggagtaaatgaaaaggcaagagagaaattttatgaggctaaactacagcagcaacagagagagctaaaacaattgcaggaagaaagaaagaaactgattgacattcaggagaaaattcaagcattgcaaacggcatgccctgacttacagctgtcagctgctagtgtgggtaactgtcccaccaaaaaatatatgccagctgttacttcaaccccaactgttaatcaacacgagaccagtacaagcaaatctgtttttgagcctgaagattcttcaatagtagataatgagttgtggtcagaaatgagaagacatgaaatgttgagggaggagctgcgacagagaagaaagcagcttgaagctctgatggctgaacatcagaggaggcaaggtctagctgaaactgcatctccagtggctgtgtcattgagaagtgatggatctgagaacctatgtactcctcagcaaagtagaacagaaaaaacgatggcaacttggggagggtctacccagtgtgcactagatgaagaaggagatgaagacggttacctttctgaaggaattgttcggacagatgaagaggaggaagaagagcaagatgccagttccaatgataacttttctgtgtgtccttctaacagtgtgaatcataactcctacaatggaaaggaaactaaaaataggtggaagaacaattgccctttttcggcagatgaaaattatcgtcctttagccaagacaaggcaacagaatatcagcatgcaacggcaagaaaaccttcgttgggtgtcagagctctcttacgtagaagagaaagaacaatggcaagaacaaatcaatcagctaaagaaacagcttgattttagtgtcagtatttgtcagactttgatgcaagaccagcagactctatcttgtctgctacaaactcttctcacgggtccttacagtgttatgcccagcaatgttgcatctcctcaagtacacttcataatgcaccagttgaaccagtgctatactcagctaacatggcaacagaataatgttcagaggttgaaacaaatgctaaatgaacttatgcgccagcaaaatcagcatccagaaaaacctggaggcaaggaaagaggcagtagtgcatcgcaccctccttctcccagtttattttgtcctttcagctttccaacacagcctgtaaatctcttcaatatacctggatttactaacttttcatcatttgcaccaggtatgaatttcagccctttatttccttctaattttggagatttttctcagaatatctctacacccagtgaacagcagcaacccttagcccagaattcttcaggaaaaacagaatatatggcttttccaaaaccttttgaaagcagttcctctattggagcagagaaaccaaggaataaaaaactgcctgaagaggaggtggaaagcagtaggacaccatggttatatgaacaagaaggtgaagtagagaaaccatttatcaagactggattttcagtgtctgtagaaaaatctacaagtagtaaccgcaaaaatcaattagatacaaacggaagaagacgccagtttgatgaagaatcactggaaagctttagcagtatgcctgatccagtagatccaacaacagtgactaaaacattcaagacaagaaaagcgtctgcacaggccagcctggcatctaaagataaaactcccaagtcaaaaagtaagaagaggaattctactcagctgaaaagcagagttaaaaacatcaggtatgaaagtgccagtatgtctagcacatgtgaaccttgcaaaagtaggaacagacattcagcccagactgaagagcctgttcaagcaaaagtattcagcagaaagaatcatgagcaactggaaaaaataataaaatgtaataggtctacagaaatatcttcagaaactgggagtgatttttccatgtttgaagctttgcgagatactatttattctgaagtagctacattaatttctcaaaatgaatctcgtccacattttcttattgaactcttccatgagctgcagctactaaacacagactacttgagacagagggctttatatgcattgcaggacatagtatccagacatatttctgagagccatgaaaaaggagaaaatgtaaagtcagtaaactctggtacttggatagcatcaaactcagaacttactcctagtgagagccttgctactactgatgatgaaacttttgagaagaactttgaaagagaaacccataaaataagtgagcaaaatgatgctgataatgctagtgtcctgtctgtatcatcaaattttgagccttttgcaacagatgatctaggtaacaccgtgattcacttagatcaagcattagccagaatgagagaatatgagcgtatgaagactgaggctgaaagtaactcaaatatgagatgcacctgcaggattattgaggatggagatggtgctggtgcaggtactacagttaataatttagaagaaactcccgttattgaaaatcgtagttcacaacaacctgtaagtgaagtttctaccatcccatgtcctagaattgatactcagcagctggaccggcaaattaaagcaattatgaaagaagtcattccttttttgaaggagcacatggatgaagtatgctcctcgcagcttctaacttcagtaaggcgcatggttttgacccttacccagcaaaatgatgagagcaaagagtttgtaaagttctttcataaacaacttggaagtatattacaggattcactggcaaaatttgctggcagaaaactgaaagactgtggagaagatcttcttgtagagatatctgaagtgttgttcaatgaattggctttctttaagcttatgcaagatttggataataatagtataactgttaaacagagatgcaaaaggaaaatagaagcaactggagtgatacaatcttgtgccaaagaggctaaaaggattcttgaagatcatggctcacctgctggagagattgatgatgaagacaaagacaaggatgaaactgaaacagttaagcagactcaaacatctgaggtgtatgatggtcccaaaaatgtaagatctgatatttctgatcaagaggaagatgaagaaagtgaaggatgtccagtgtctattaatttgtctaaagctgaaactcaggctttaactaattatggaagtggagaagatgaaaatgaggatgaagaaatggaagaatttgaagaaggccctgtggatgtccagacttccctccaggctaacactgaagctactgaagaaaatgaacatgatgaacaggtcctacaacgtgactttaaaaagacagcagaaagcaaaaatgtcccattggaacgagaagccactagtaaaaaaaataactgtcctgtgaaaccctgttacctcaatatcttggaagatgagcaacctttaaatagtgctgcccataaggagtcacctcctactgttgattcaactcaacagcctaaccctttgccgttacgtttacctgaaatggaacccttagtgcctagagtcaaagaagttaaatctgctcaggaaactcctgaaagctctctggctggaagtcctgatactgaatctccagtgttagtgaatgactatgaagcagaatctggtaatataagtcaaaagtctgatgaagaagattttgtaaaagttgaagatttaccactgaaactgacaatatattcagaggcagatctaagaaagaaaatggtagaagaagaacagaaaaaccatttatctggtgaaatatgtgaaatgcagaccgaagaattagctggaaattctgagacactaaaagaacctgaaacggtgggagcccagagtatatgagatgtcttcagaggctcatctaactctgtccttacatactcaatgcatatatgaaaacaatactaaataaacatctgatctgtataaaaatgtaaattagtttgacactgcttttttgataggtgtggtcatttctccccatggtagtttaaaacatcagaaactgaattctggacagatttaagccttgacacactgtgtttttttttttttcccccttcttttttgggtcttcatttttttccccattgtgatgtttggtaacgaatttaaaatgtagttttaaataaagtttggacttatctataaagta

SEQ ID NO: 446 - DNA, 5987 bp, Homo sapiens; identical to SEQ ID NO: 294

SEQ ID NO: 447 - DNA, 805 bp, Homo sapiens; identical to SEQ ID NO: 286

SEQ ID NO: 448 - DNA, 1836 bp, Homo sapiens
ggcgctgggcggctgcggcgcgcggtgcgcggtgcgtagtctggagctatggtggtggtggcagccgcgccgaacccggccgacgggacccctaaagttctgcttctgtcggggcagcccgcctccgccgccggagccccggccggccaggccctgccgctcatggtgccagcccagagaggggccagcccggaggcagcgagcggggggctgccccaggcgcgcaagcgacagcgcctcacgcacctgagccccgaggagaaggcgctgaggaggaaactgaaaaacagagtagcagctcagactgccagagatcgaaagaaggctcgaatgagtgagctggaacagcaagtggtagatttagaagaagagaaccaaaaacttttgctagaaaatcagcttttacgagagaaaactcatggccttgtagttgagaaccaggagttaagacagcgcttggggatggatgccctggttgctgaagaggaggcggaagccaaggggaatgaagtgaggccagtggccgggtctgctgagtccgcagcactcagactacgtgcacctctgcagcaggtgcaggcccagttgtcacccctccagaacatctccccatggattctggcggtattgactcttcagattcagagtctgatatcctgttgggcattctggacaacttggacccagtcatgttcttcaaatgcccttccccagagcctgccagcctggaggagctcccagaggtctacccagaaggacccagttccttaccagcctccctttctctgtcagtggggacgtcatcagccaagctggaagccattaatgaactaattcgttttgaccacatatataccaagcccctagtcttagagataccctctgagacagagagccaagctaatgtggtagtgaaaatcgaggaagcacctctcagcccctcagagaatgatcaccctgaattcattgtctcagtgaaggaagaacctgtagaagatgacctcgttccggagctgggtatctcaaatctgctttcatccagccactgcccaaagccatcttcctgcctactggatgcttacagtgactgtggatacgggggttccctttccccattcagtgacatgtcctctctgcttggtgtaaaccattcttgggaggacacttttgccaatgaactctttccccagctgattagtgtctaaggaatgatccaatactgttgcccttttccttgactattacactgcctggaggatagcagagaagcctgtctgtacttcattcaaaaagccaaaatagagagtatacagtcctagagaattcctctatttgttcagatctcatagatgacccccaggtattgtcttttgacatccagcagtccaaggtattgagacatattactggaagtaagaaatattactataattgagaactacagcttttaagattgtacttttatcttaaaagggtggtagttttccctaaaatacttattatgtaagggtcattagacaaatgtcttgaagtagacatggaatttatgaatggttctttatcatttctcttccccctttttggcatcctggcttgcctccagttttaggtcctttagtttgcttctgtaagcaacgggaacacctgctgagggggctctttccctcatgtatacttcaagtaagatcaagaatcttttgtgaaattatagaaatttactatgtaaatgcttgatggaattttttcctgctagtgtagcttctgaaaggtgctttctccatttatttaaaactacccatgcaattaaaaggtacaatgcaaaaaaaaaaaaaaaaa

SEQ ID NO: 449 - DNA, 2645 bp, Homo sapiens; identical to SEQ ID NO: 300

SEQ ID NO: 450 - DNA, 3044 bp, Homo sapiens
caggtatctaacctatctttgtatttttggaatttaatatagttcctgacataatcattgttcaatgggtctaatttttttttcctttaaaggcatttggatacctttgtgatagaaaaggcccttttcttcatccattgatggtttgatagtgggctgggaaggaaagctgtgttcctccacattaggcagcaaatacttgattgatttgatatttagcttagtcaaattgaagatctcaaacagacaaatcatggcttggaagaatgtgttaggaaactcttggatagtaaggaggtggtaagcagtcaagtagatgatttaaccagccacaatgagcatctttgtaaagaattgattaaaattgaccaactagcagagcaactcgaaaaagagaaaaattttgtggtggattccgccaacaaggaacttgaagaagccaagattgatctcatttgccagcaaaataatattatagtattggaagatacaataaaaaggcttaaatctataattttagatactgaaaaagcacaaaataaatctccttctagacttgattcctttgtcaagactttggaagcagacaaagatcactataagagtgaagctcaacatttgagaaagatgatgcgaagtaggtctaaaagtccaagacgcccatcaccaactgcccggggtgcaaactgtgatgtagaacttttgaagacaacaacaagagatcgtgaagaacttaaatgcatgctggaaaaatatgagcgccatttggcagaaattcagggtaatgtcaaggttcttaaatctgagagagacaagatcttccttctttatgaacaggcacaggaagaaattacccgacttcgacgagaaatgatgaaaagctgtaagagtcctaaatcaacaacggcacatgctattctccggcgagtggagactgaaagagatgtagcctttactgatttacgaagaatgaccacagaacgagatagtctaagggagaggctaaagattgctcaagagacagcatttaatgagaaggctcacctggaacaaaggatagaggagctggagtgtacagttcataatcttgatgatgaacgtatggagcaaatgtcaaatatgactttgatgaaggaaaccataagcactgtggaaaaagaaatgaaatcactagcaagaaaggcaatggataccgaaagtgaacttggcagacaaaaagcagagaataattctttgagacttttgtatgaaaacacagaaaaagatctttctgatactcagcgacaccttgctaagaaaaaatatgagctacagcttactcaggagaaaattatgtgcttggatgaaaaaattgataactttacaaggcaaaatattgcacagcgagaagaaatcagcattcttggtggaaccctcaatgatctggctaaagaaaaggaatgcctgcaagcatgtttggataaaaaatctgagaatattgcatcccttggagagagtttggcaatgaaagaaaagaccatttcaggcatgaagaatatcattgctgagatggaacaggcatcaagacagtgtactgaggccctaattgtgtgtgaacaagacgtttccagaatgcgtcggcaattggatgagacaaatgatgagctggcccagatcgccagggaaagagatatcttggctcatgacaatgacaatctccaggaacagtttgctaaagctaaacaagaaaaccaggcactgtccaaaaaattgaatgacactcataatgaacttaatgacataaaacagaaggttcaagatactaatttggaggttaacaagctgaagaatatattaaagtctgaagaatctgagaaccggcaaatgatggaacaacttcgaaaagccaatgaagatgctgaaaactgggaaaataaagcccgtcaatcagaggcagataacaataccctcaaactggaacttatcactgctgaggcagagggtaacagattaaaagaaaaagtagattccctcaacagagaggttgagcaacacttaaatgcagaaaggtcttacaagtcccagatttctaccttacataaatctgttgtaaaaatggaagaggagcttcagaaggttcagtttgaaaaagtgtccgctcttgcagatttgtcttctactagggaactctgtattaaacttgactcaagcaaagaacttcttaatcgacagctggttgctaaagatcaagaaatagaaatgagggagaatgagttagattctgctcattctgaaattgaactcctgaggagtcagatggcaaatgagagaatctccatgcagaatctagaagctttgctggtggccaatcgagacaaagaatatcagtctcagatagcacttcaagaaaaagaatctgaaattcagcttcttaaagaacacctttgtttggcagaaaataaaatggccatccagagtagagatgtggcccagttcagaaatgttgtcacacaattggaagctgatttagacattaccaaaagacaactaggaacagagcgctttgaaagggagagggccgtacaagaacttcgccgccaaaattattcaagtaatgcttatcatatgagttctacaatgaagccaaatacaaaatgtcattcaccagaacgtgctcaccatcgatctcctgaccgaggcctagatcgatcattagaagagaatctttgctacagagatttctgacacctgaaatgattcttcacatccctgagaaaggtcaaagttacaaactgattttttttttttttgctacatgagtgcatttatcttttaaatgcttggcaatgttaaatgtatttattaactttgtgtctctgaatctctgttctaatgtgccatgttgcagtgatctgagatgacttataaaaacaaaaatgtatatggctctttctatccatgcagtgatagtgagtgtaaaatctgcttacttcactattgaacactattctgttcactatctggagtaaataaagaagcttattaaaacagggaaaaaaaaaaaa

SEQ ID NO: 451 - DNA, 993 bp, Homo sapiens
attccacgttcttaactgttccattttccgtatctgcttcgggcttccacctcatttttttcgctttgcccattctgtttcagccagtcgccaagaatcatgaaagtcgccagtggcagcaccgccaccgccgccgcgggccccagctgcgcgctgaaggccggcaagacagcgagcggtgcgggcgaggtggtgcgctgtctgtctgagcagagcgtggccatctcgcgctgcgccgggggcgccggggcgcgcctgcctgccctgctggacgagcagcaggtaaacgtgctgctctacgacatgaacggctgttactcacgcctcaaggagctggtgcccaccctgccccagaaccgcaaggtgagcaaggtggagattctccagcacgtcatcgactacatcagggaccttcagttggagctgaactcggaatccgaagttggaacccccgggggccgagggctgccggtccgggctccgctcagcaccctcaacggcgagatcagcgccctgacggccgaggcggcatgcgttcctgcggacgatcgcatcttgtgtcgctgaagcgcctcccccagggaccggcggaccccagccatccagggggcaagaggaattacgtgctctgtgggtctcccccaacgcgcctcgccggatctgagggagaacaagaccgatcggcggccactgcgcccttaactgcatccagcctggggctgaggctgaggcactggcgaggagagggcgctcctctctgcacacctactagtcaccagagactttagggggtgggattccactcgtgtgtttctattttttgaaaagcagacattttaaaaaatggtcacgtttggtgcttctcagatttctgaggaaattgctttgtattgtatattacaatgatcaccgactgaaaatattgttttacaatagttctgtggggctgtttttttgttattaaacaaataatttagatggtgaaaaaaaaaa

SEQ ID NO: 452 - DNA, 2477 bp, Homo sapiens
gctcgggcgccgagtctgcgcgctgacgtccgacgctccaggtactttccccacggccgacagggcttggcgtgggggcggggcgcggcgcgcagcgcgcatgcgccgcagcgccagcgctctccccggatcgtgcggggcctgagcctctccgccggcgcaggctctgctcgcgccagctcgctcccgcagccatgcccaccaccatcgagcgggagttcgaagagttggatactcagcgtcgctggcagccgctgtacttggaaattcgaaatgagtcccatgactatcctcatagagtggccaagtttccagaaaacagaaatcgaaacagatacagagatgtaagcccatatgatcacagtcgtgttaaactgcaaaatgctgagaatgattatattaatgccagtttagttgacatagaagaggcacaaaggagttacatcttaacacagggtccacttcctaacacatgctgccatttctggcttatggtttggcagcagaagaccaaagcagttgtcatgctgaaccgcattgtggagaaagaatcggttaaatgtgcacagtactggccaacagatgaccaagagatgctgtttaaagaaacaggattcagtgtgaagctcttgtcagaagatgtgaagtcgtattatacagtacatctactacaattagaaaatatcaatagtggtgaaaccagaacaatatctcactttcattatactacctggccagattttggagtccctgaatcaccagcttcatttctcaatttcttgtttaaagtgagagaatctggctccttgaaccctgaccatgggcctgcggtgatccactgtagtgcaggcattgggcgctctggcaccttctctctggtagacacttgtcttgttttgatggaaaaaggagatgatattaacataaaacaagtgttactgaacatgagaaaataccgaatgggtcttattcagaccccagatcaactgagattctcatacatggctataatagaaggagcaaaatgtataaagggagattctagtatacagaaacgatggaaagaactttctaaggaagacttatctcctgcctttgatcattcaccaaacaaaataatgactgaaaaatacaatgggaacagaataggtctagaagaagaaaaactgacaggtgaccgatgtacaggactttcctctaaaatgcaagatacaatggaggagaacagtgagagtgctctacggaaacgtattcgagaggacagaaaggccaccacagctcagaaggtgcagcagatgaaacagaggctaaatgagaatgaacgaaaaagaaaaaggtggttatattggcaacctattctcactaagatggggtttatgtcagtcattttggttggcgcttttgttggctggagactgttttttcagcaaaatgccctataaacaattaattttgcccagcaagcttctgcactagtaactgacagtgctacattaatcataggggtttgtctgcagcaaacgcctcatatcccaaaaacggtgcagtagaatagacatcaaccagataagtgatatttacagtcacaagcccaacatctcaggactcttgactgcaggttcctctgaaccccaaactgtaaatggctgtctaaaataaagacattcatgtttgttaaaaactggtaaattttgcaactgtattcatacatgtcaaacacagtatttcacctgaccaacattgagatatcctttatcacaggatttgtttttggaggctatctggattttaacctgcacttgatataagcaataaatattgtggttttatctacgttattggaaagaaaatgacatttaaataatgtgtgtaatgtataatgtactattgacatgggcatcaacacttttattcttaagcatttcagggtaaatatattttataagtatctatttaatcttttgtagttaactgtactttttaagagctcaatttgaaaaatctgttactaaaaaaaaaaattgtatgtcgattgaattgtactggatacattttccatttttctaaaaagaagtttgatatgagcagttagaagttggaataagcaatttctactatatattgcatttcttttatgttttacagttttccccattttaaaaagaaaagcaaacaaagaaacaaaagtttttcctaaaaatatctttgaaggaaaattctccttactgggatagtcaggtaaacagttggtcaagactttgtaaagaaattggtttctgtaaatcccattattgatatgtttatttttcatgaaaatttcaatgtagttggggtagattatgatttaggaagcaaaagtaagaagcagcattttatgattcataatttcagtttactagactgaagttttgaagtaaacacttttcagtttctttctacttcaataaatagtatgattatatgcaaaccttaaaaaa

SEQ ID NO: 453 - DNA, 2194 bp, Homo sapiens
gggtctcgccggctcgccgcgctccccaccttgcctgcgcccgcccggagccagcggttctccaagcacccagcatcctgctagacgcgccgcgcaccgacggaggggacatgggcagagcaatggtggccaggctcgggctggggctgctgctgctggcactgctcctacccacgcagatttattccagtgaaacaacaactggaacttcaagtaactcctcccagagtacttccaactctgggttggccccaaatccaactaatgccaccaccaaggcggctggtggtgccctgcagtcaacagccagtctcttcgtggtctcactctctcttctgcatctctactcttaagagactcaggccaagaaacgtcttctaaatttccccatcttctaaacccaatccaaatggcgtctggaagtccaatgtggcaaggaaaaacaggtcttcatcgaatctactaattccacaccttttattgacacagaaaatgttgagaatcccaaatttgattgatttgaagaacatgtgagaggtttgactagatgatggatgccaatattaaatctgctggagtttcatgtacaagatgaaggagaggcaacatccaaaatagttaagacatgatttccttgaatgtggcttgagaaatatggacacttaatactaccttgaaaataagaatagaaataaaggatgggattgtggaatggagattcagttttcatttggttcattaattctataaggccataaaacaggtaatataaaaagcttccatgattctatttatatgtacatgagaaggaacttccaggtgttactgtaattcctcaacgtattgtttcgacagcactaatttaatgccgatatactctagatgaagttttacattgttgagctattgctgttctcttgggaactgaactcactttcctcctgaggctttggatttgacattgcatttgaccttttatgtagtaattgacatgtgccagggcaatgatgaatgagaatctacccccagatccaagcatcctgagcaactcttgattatccatattgagtcaaatggtaggcatttcctatcacctgtttccattcaacaagagcactacattcatttagctaaacggattccaaagagtagaattgcattgaccacgactaatttcaaaatgctttttattattattattttttagacagtctcactttgtcgcccaggccggagtgcagtggtgcgatctcagatcagtgtaccatttgcctcccgggctcaagcgattctcctgcctcagcctcccaagtagctgggattacaggcacctgccaccatgcccggctaatttttgtaattttagtagagacagggtttcaccatgttgcccaggctggtttcgaactcctgacctcaggtgatccacccgcctcggcctcccaaagtgctgggattacaggcttgagcccccgcgcccagccatcaaaatgctttttatttctgcatatgttgaatactttttacaatttaaaaaaatgatctgttttgaaggcaaaattgcaaatcttgaaattaagaaggcaaaaatgtaaaggagtcaaaactataaatcaagtatttgggaagtgaagactggaagctaatttgcattaaattcacaaacttttatactctttctgtatatacattttttttctttaaaaaacaactatggatcagaatagccacatttagaacactttttgttatcagtcaatatttttagatagttagaacctggtcctaagcctaaaagtgggcttgattctgcagtaaatcttttacaactgcctcgacacacataaacctttttaaaaatagacactccccgaagtcttttgttcgcatggtcacacactgatgcttagatgttccagtaatctaatatggccacagtagtcttgatgaccaaagtcctttttttccatctttagaaaactacatgggaacaaacagatcgaacagttttgaagctactgtgtgtgtgaatgaacactcttgctttattccagaatgctgtacatctattttggattgtatattgtgtttgtgtatttacgctttgattcatagtaacttcttatggaattgatttgcattgaacacaaactgtaaataaaaagaaatggctgaaagagcaaaaaaaaaaaaa

SEQ ID NO: 454 - DNA, 4050 bp, Homo sapiens
gtgccccccgcgctccgctccggcagctccacgctcgcgcccgccatgccggagcagttcagcgtcgccgagttcctggccgtcaccgcggaggacctcagctccccggctggggccgccgccttcgccgccaagatgccccggtaccgaggggcggcgctggcgcgggaggagatcttggaaggagaccaagccatcctgcagagaataaagaaggctgtgcgggcaatccatagctccggccttggccatgtggagaatgaagagcagtaccgagaggccgtggaatccttaggcaacagccacctgtcccagaacagccatgagctgtccacaggcttcctaaacttggccgtgttcacccgcgaggttgctgcgctcttcaagaacctgattcagaacttgaacaacattgtctctttccccctggacagtctgatgaaggggcagctgagggacggtcgacaggattccaaaaaacagctggagaaggcatggaaggactatgaagccaaaatggccaagctggagaaggagcgcgatcgggccagggtgacaggagggatccctggggaggtggcccaggacatgcagagagagcggcgcatcttccagctgcacatgtgtgagtatctgctcaaagccggggagagccagatgaagcaaggtcctgacttccttcagagcctcatcaagttcttccacgcccagcacaactttttccaagatggctggaaggctgcccagagcctgttccccttcatcgagaagctggcggcctcagtacatgcactccatcaggcccaggaggacgagctacagaagctgacccagctccgggactccctccgagggacactgcagcttgagagcagagaggaacacctgagccggaagaactcaggatgtggctatagcatccaccagcaccaaggcaacaagcagtttgggacggagaaagtgggctttctatacaagaaaagtgacggaattcgaagagtctggcagaaaaggaagtgtggagtcaagtatggctgcctgaccatctcacacagcacgataaaccggcccccggtgaagctgaccctgctgacgtgccaagtgaggccaaaccctgaggagaaaaagtgcttcgacctggtgacccacaaccggacgtaccactttcaggcagaggacgagcacgagtgtgaggcgtgggtgtcagtgttgcagaacagcaaggacgaagccctgagcagcgccttcctcggggagcccagcgctggcccggggtcctgggggtccgccggccatgatggggagccgcacgacctcacaaagctgctcatcgcggaggtgaagagcaggcctgggaatagccagtgctgcgactgcggggctgcagaccccacgtggctcagcaccaacctgggcgtgctcacctgcatccagtgctcgggcgtccaccgcgaactgggcgtgcgcttttcgcgcatgcagtcactcaccttggacctgctgggcccctccgagttgttgctggccttgaacatgggaaacacgagcttcaatgaggtcatggaggcccagctaccctcacacggcggccctaaaccctcagctgagagtgacatgggcacccgcagggactacattatggccaagtatgtggagcataggtttgcacgccggtgcacacctgagcctcagcgactctggacagccatttgcaacagggacctcctgtcggtactggaggcctttgccaatgggcaggactttggacagccgctgccagggcctgatgcacaggcacctgaagaactcgtcttgcatttggctgtcaaagtcgccaaccaggcttccctgcctctggtggatttcatcatccagaacggtggtcacctggatgccaaggctgctgacgggaacacggctctgcactacgcagcactctacaaccagcccgactgcctcaagctgctgctgaaggggagagctttggttggcacagtaaatgaagcaggcgagacagctctggacatagccaggaagaagcaccacaaggagtgtgaggagctgctggagcaggcccaggcggggacctttgccttccctctacatgtggactactcctgggtaatttccacagagcctggctctgacagtgaggaggatgaggaagagaagcgctgcttgctgaagctcccggcccaggctcactgggccagtgggaggctggacatcagcaacaagacctatgagactgtcgccagcctgggagcagccacccctcagggcgagagtgaggactgtcccccgcccttgccagtcaaaaactcttctcggactttggtccaagggtgtgcaagacatgccagtggagatcgttctgaagtctccagcctgagttcagaggcccctgagacccctgagagcctgggcagtccagcctcctcctccagtctgatgagccccttggaacctggggatcccagccaagccccacccaactctgaagagggcctccgagagcccccaggcacctccagacccagcctgacatccgggaccaccccttcggagatgtacctccccgtcagattcagctccgagagcactcgctcctatcggcggggggcgcggagccctgaagatggtccctcagccaggcagcctctgcccagaaggaacgtgccggttggcatcactgaaggagatggctcaaggactgggagtctcccagcaagttctgtgcaacttttgcaagactagctccttgctggcccccacatgccccatgctaggccccaatgttcagagctgggacttgagctcacaaaactggggagctgagacatttgttctcttggatctcactctctctgtcccttgtgcctctgtagctggccttcttcctgccacaggccatgcctctaccaaggacacatggcctttccctgttagggctgatggcggttctttcctatctcattacccgctaggggcctgggagccctgtggctggatctgagtgctcctgagctggcttcagctgcagaactctcagtccctcatcagatcgagactctatttcccccgtcagtctgggggcttcacaagggcaggagagccctccatcactgacttccagatcagggaccctgccaagtagggactgtcttctcagccagccatttattagtctaatattccttcactaaattccaactctatgtctggacctgtgttaggcacttcagataccacacgagtaagacaagggccctgcaggggtggtcctttggtggaaagctggtcttaagggttgggcttgggaataggcagggtcagattccagggcatggctctggactcagctggtttatacctatatgaccattacagttgtctacagatcacatccattctggctggtcaacatgcatgctgtactggctgttaaataaaaatattctgaatgtcactccttttgagggacagcacagccttccctaggcattctcctatattccccagccaaattgtagagtcagatgcacccacatttgcctgtgtccttgatttagcaggaaggaaaggaatagtcggggttgatggatgcccacttctcttctctttctcttggtcaactcaggagccttttagtctgagggaatggagaggcaaagaaagaagggagagtaatagaattgggagggcagagacttaagggttctgcttcccagccctagaaattctatcattgctcagccccaatgagaaagcagatacacctaagccatcatcaaccactaacatctcaacttgccagttgctgggtgctgggccctggcaggaatgggccaagccaagcaggggagactagagagcaccaatggccaacacagctgcctggctggggaggctgtgctgtttcccctggagacctgactggtctgtggttcccacaggaacagggttgtcttttgagcccccagtgtctggtttcattcatctcagacttgttatttcactcatctctaataaaggattggggggtcagtt

SEQ ID NO: 455 - DNA, 3609 bp, Homo sapiens
tcaaggacgcatcacctaatgccgcggtcacggccaccgtcacaagcgcccccagccccaccccaccccggcctgcccgccgtccttctcccgcccccgcccctgcctgccagctccaccgggccgtaggtgcggacgacctcaaaattcctcggcccgcgaaggccgccagctgcggggaggggaggggaggcgcggtcccgcagcgcccccaggctcatgtcccaggtatgtccagacccccgaggcaccgcttgcagggcagtgacagcccgtgaggctcggcctcgacccctggcacccttggtcccagctacgccggctcctggccttcccccaagtccgagagagaggtgggattctccccgacgcagttggaaaccgggaatcccctttagggtcccgttcgtgctgcactactgactccaccatctgcaaagggattcttgtccagaatccccgaaggctttaggacagcgcttattttgttgaatgaagagtctctaattttcggaaagaccacaggctaaaagtcaagttgtgcctttttagccaagaagcatggaagtcattcacggcaggccctactgttgcagggagcttgaaggagctgacatactgtccaacaccttttactctaatgaattgcacaaccccctccagacggttactcgcccaactgcctcagaggacaggtatcaggaattaagggagtcacttcaacaatgtaggcttccttggggcgctgaaagagagtatggtgggataataccgatttcactccccgaggaccacaggccaaagtatgagcctcctcgtgtcatgggcaaaggacatcagcattatggatttggtggagaaacctggccaagaaagcttcctgttgaacaattttattatttgacccagaacaaaaaaagtgatgtctatggaaatgattctttgatacccaagccgcctaattcaacagtaggagagatctgcttgccatatccaattgaacacccctaccacacacacatctgtcgcggcgccatgttccccaccttcacgtcacctgaggacctctacacgggcattaaagcccgcacccagcagccctttcctcccacggtgccaaccaaggcttatgattcaacagttttgaagacaagaggtaatccttatagatatgaactgattgatattcccatggattcaaagaagaaagcactgacttggccaggtcaaggtgtatattatgattttcccagaggtgttgagaaaaataagccagtattctacccaaaacctcctaaaaccttcgctcctaacacttctttaaattcatgggaccctatttgctctgccaaagaagccaacatacaaagaaatcttgagaggtcccactggctcacttcgtacactcatgattttacaggtctggggcccatggacccccttgaactggatgattaccatgaaaagatggtagcagagttaacacgaaagataggatttgacccagagccgcaagaaaaattccaccctgtcttcaaacctcccagaccgttggaaggacgaattgcccgattaattcagaaccgacgttctctggaggctatagtccagcaaagaccacgttcctgtccagattgtactcctagagttttgtgtaattttcatacctttgtacccagttctaaagaaatggtggcacttagtgataacataccagccggtgtgacccataaaaaccaggatattgaagagaagatcatagaagaacagagcttgctgtctacctatgaactcccatcttgttacccaacaaaagacctaactagcatttatgacataaagccatttccaaaaatcacagatactaaaaagacagaagatttatactggagacagcagtcactaaaaacccaacccacaccttactgtaaaccagaccactggattcactatgaaaatcttaaatctcccctacgtgatcagtataatatgtgtccagaccctgttagccttagtaaacctagtgttttacaaaataaacaagacacggaagctttcactttagaacattttttaagtaagccagaagaagagttgttcttgaatatggaaaacaatgaagaaacaagacctgttcttggttggattcctagagctggagtgaccaaacctcagaccaacctgctggagcttaagaactctttttcaaaaactggtgcacaaaagcgtttccataaatcaattctagaagaccataaagacctcagggataatgagcattcggggatgaagcaccaattctatggccataattcctattatttctataattgagatactcattcttcccttcaaaacccagcctcttgcaagaagctaaaaaatataacagaatttccttcgtattgctggattctgttttctagattaaaccacaaggaccttgttagtgaggtttacattttcaggaatttaagttagtatctggttggaggaacccagaaaaggtgatgttatgacttcttgaaaagtttaacaatttggcaataaaatattagaactagaaaaatttatagtctttaatctctcatcttcagattatacaaggaaattttccaaaatcacaaaaagcaatgtgtacaacaaagtttacatcattgtttcaccaaaaaaaattgaaaagctggaaagaactcaaatgatcaataattaatgaatgactatacaaattatagtatcttaataaaaatgagaacactgtccctttatgtaaatttttgtacatagtagcattaggtagaaaagacaaaacccaaacacctagttaattgagggatggacacctctaaaaactatattgtcttaaaagtatgtggactctgttcctttatgtaaacatgtaaagaaaataagtcagcgaaaaaaatgaaacccaaaactctctgcatgtacacattacaaattgaattgtttgcttacccttaaccttctgattgagaaacataactgtttcttttatgcagataaaattattttactgaagatctagcaatggccttaattagcaactggtgagttctaattatagcaagaaaggatggcttggtatcagttattacagagccccaaatcttcatttctggagtgtgttctctaagagtttggctaactcccatatgcaagtcaattcatttaatgtgccaagaggtagattttaaacatagtctatcgtggaagttcaagaggaatttctttaagtattttgtgaatatttattttaattttatgaccaacatgtcatttggttgtaacctccttaaaactattctgggctaaagttagagaatttttttccaactgcattctgtacagcactagttacattatgacaggaagtaaaagtttacatggtgaaataatactggggaaatcggagcaacaatgtcagttgcatgccttggtcactgggttctctatagcctttaatatgtaatgcaattgggagtgtctgaagtgagggagatatagtgtacacactttttatcacagagtagatcactggaatggaattccaaataataaactttggaaggtgtaactctccagtat

SEQ ID NO: 456 - DNA, 2445 bp, Homo sapiens
acctcgttcatctccttcacctccgaaatgatctcgcttttgggtttacggccggtctcttcacctggagcatcagccgggaaggtcagggtcgccctggctcgggcctgttcacattggggtcaaaggcacacattgggggctcaaccaaggcgagctgcgttcgcggggccgggtctttccgcacaggcggagggcggtggcgggcgcggaggcgtcgcgcgagccagggggcagccacgggccgggggtacctagcgccacccgcttcgcttgcatcagctgcgcgccccatcccgaggaatggtagaggcagccccgcccccggcccgcccccgcctttccattggctgccgcgcggggcggggagcggggtcggctcagtggccctgagaccctagctctgctctcggtccgctcgctgtccgctagcccgctgcgatgttgcgcgctgccgcccgcttcgggccccgcctgggccgccgcctcttgtcagccgccgccacccaggccgtgcctgcccccaaccagcagcccgaggtcttctgcaaccagattttcataaacaatgaatggcacgatgccgtcagcaggaaaacattccccaccgtcaatccgtccactggagaggtcatctgtcaggtagctgaaggggacaaggaagatgtggacaaggcagtgaaggccgcccgggccgccttccagctgggctcaccttggcgccgcatggacgcatcacacaggggccggctgctgaaccgcctggccgatctgatcgagcgggaccggacctacctggcggccttggagaccctggacaatggcaagccctatgtcatctcctacctggtggatttggacatggtcctcaaatgtctccggtattatgccggctgggctgataagtaccacgggaaaaccatccccattgacggagacttcttcagctacacacgccatgaacctgtgggggtgtgcgggcagatcattccgtggaatttcccgctcctgatgcaagcatggaagctgggcccagccttggcaactggaaacgtggttgtgatgaaggtagctgagcagacacccctcaccgccctctatgtggccaacctgatcaaggaggctggctttccccctggtgtggtcaacattgtgcctggatttggccccacggctggggccgccattgcctcccatgaggatgtggacaaagtggcattcacaggctccactgagattggccgcgtaatccaggttgctgctgggagcagcaacctcaagagagtgaccttggagctgggggggaagagccccaacatcatcatgtcagatgccgatatggattgggccgtggaacaggcccacttcgccctgttcttcaaccagggccagtgctgctgtgccggctcccggaccttcgtgcaggaggacatctatgatgagtttgtggagcggagcgttgcccgggccaagtctcgggtggtcgggaacccctttgatagcaagaccgagcaggggccgcaggtggatgaaactcagtttaagaagatcctcggctacatcaacacggggaagcaagagggggcgaagctgctgtgtggtgggggcattgctgctgaccgtggttacttcatccagcccactgtgtttggagatgtgcaggatggcatgaccatcgccaaggaggagatcttcgggccagtgatgcagatcctgaagttcaagaccatagaggaggttgttgggagagccaacaattccacgtacgggctggccgcagctgtcttcacaaaggatttggacaaggccaattacctgtcccaggccctccaggcgggcactgtgtgggtcaactgctatgatgtgtttggagcccagtcaccctttggtggctacaagatgtcggggagtggccgggagttgggcgagtacgggctgcaggcatacactgaagtgaaaactgtcacagtcaaagtgcctcagaagaactcataagaatcatgcaagcttcctccctcagccattgatggaaagttcagcaagatcagcaacaaaaccaagaaaaatgatccttgcgtgctgaatatctgaaaagagaaatttttcctacaaaatctcttgggtcaagaaagttctagaatttgaattgataaacatggtgggttggctgagggtaagagtatatgaggaaccttttaaacgacaacaatactgctagctttcaggatgatttttaaaaaatagattcaaatgtgttatcctctctctgaaacgcttcctataactcgagtttataggggaagaaaaagctattgtttacaattatatcaccattaaggcaactgctacaccctgctttgtattctgggctaagattcattaaaaactagctgctcttaaaaaaaaaaaaaaaaaaaaaaaaaaaaaaaaaaaaaaaaaaaaaaa

SEQ ID NO: 457 - DNA, 2697 bp, Homo sapiens
acgcgggcacgcacacacggaagcacgcctccacttaactcgcgccgccgcggcagctcgagtccaccagcagcgccgtccgcttgaccgagatgctgcgggcctgtcagttatcgggtgtgaccgccgccgcccagagttgtctctgtgggaagtttgtcctccgtccattgcgaccatgccgcagatactctacttcaggcagctctgggttgactactggcaaaattgctggagctggccttttgtttgttggtggaggtattggtggcactatcctatatgccaaatgggattcccatttccgggaaagtgtagagaaaaccataccttactcagacaaactcttcgagatggttcttggtcctgcagcttataatgttccattgccaaagaaatcgattcagtcgggtccactaaaaatctctagtgtatcagaagtaatgaaagaatctaaacagtctgcctcacaactccaaaaacaaaagggagatactccagcttcagcaacagcacctacagaagcggctcaaattatttctgcagcaggtgataccctgtcggtcccagcccctgcagttcagcctgaggaatctttaaaaactgatcaccctgaaattggtgaaggaaaacccacacctgcactttcagaagaagcatcctcatcttctataagggagcgaccacctgaagaagttgcagctcgccttgcacaacaggaaaaacaagaacaagttaaaattgagtctctagccaagagcttagaagatgctctgaggcaaactgcaagtgtcactctgcaggctattgcagctcagaatgctgcggtccaggctgtcaatgcacactccaacatattgaaagccgccatggacaattctgagattgcaggcgagaagaaatctgctcagtggcgcacagtggagggtgcattgaaggaacgcagaaaggcagtagatgaagctgccgatgcccttctcaaagccaaagaagagttagagaagatgaaaagtgtgattgaaaatgcaaagaaaaaagaggttgctggggccaagcctcatataactgctgcagagggtaaacttcacaacatgatagttgatctggataatgtggtcaaaaaggtccaagcagctcagtctgaggctaaggttgtatctcagtatcatgagctggtggtccaagctcgggatgactttaaacgagagctggacagtattactccagaagtccttcctggatggaaaggaatgagtgtttcagacttagctgacaagctctctactgatgatctgaactccctcattgctcatgcacatcgtcgtattgatcagctgaacagagagctggcagaacagaaggccaccgaaaagcagcacatcacgttagccttggagaaacaaaagctggaagaaaagcgggcatttgactctgcagtagcaaaagcattagaacatcacagaagtgaaatacaggctgaacaggacagaaagatagaagaagtcagagatgccatggaaaatgaaatgagaacccagcttcgccgacaggcagctgcccacactgatcacttgcgagatgtccttagggtacaagaacaggaattgaagtctgaatttgagcagaacctgtctgagaaactctctgaacaagaattacaatttcgtcgtctcagtcaagagcaagttgacaactttactctggatataaatactgcctatgccagactcagaggaatcgaacaggctgttcagagccatgcagttgctgaagaggaagccagaaaagcccaccaactctggctttcagtggaggcattaaagtacagcatgaagacctcatctgcagaaacacctactatcccgctgggtagtgcagttgaggccatcaaagccaactgttctgataatgaattcacccaagctttaaccgcagctatccctccagagtccctgacccgtggggtgtacagtgaagagacccttagagcccgtttctatgctgttcaaaaactggcccgaagggtagcaatgattgatgaaaccagaaatagcttgtaccagtacttcctctcctacctacagtccctgctcctattcccacctcagcaactgaagccgcccccagagctctgccctgaggatataaacacatttaaattactgtcatatgcttcctattgcattgagcatggtgatctggagctagcagcaaagtttgtcaatcagctgaagggggaatccagacgagtggcacaggactggctgaaggaagcccgaatgaccctagaaacgaaacagatagtggaaatcctgacagcatatgccagcgccgtaggaataggaaccactcaggtgcagccagagtgaggtttaggaagattttcataaagtcatatttcatgtcaaaggaaatcagcagtgatagatgaagggttcgcagcgagagtcccggacttgtctagaaatgagcaggtttacaagtactgttctaaatgttaacacctgttgcatttatattctttccatttgctatcatgtcagtgaacgccaggagtgctttctttgcaacttgtgtaacattttctgttttttcaggttttactgatgaggcttgtgaggccaatcaaaataatgtttgtgatctctactactgttgattttgccctcggagcaaactgaataaagcaacaagatg

SEQ ID NO: 458 - DNA, 2575 bp, Homo sapiens
acaagccatgagcagcgacccgcgggcgacgcgctgtccctggcagccgctgagcccgaccccgcaggcagctcgccgctccctagcaccttctccagtcgacactctcgcgcccggagaaacatgattcccgtgacagaattccggcagttctctgagcagcagcctgccttccgagtgctgaagccatggtgggatgtgtttaccgattacctctcagtagccatgctcatgattggcgtgtttggatgtactttacaggtcatgcaagacaagataatctgccttccgaaaagagtgcagcctgctcagaaccactcttccctttcgaatgtctctcaagcagttgccagtaccactccactgcctccacctaaaccatctcctgctaaccccatcactgtggaaatgaaaggcctgaagacagatttggaccttcagcagtacagctttataaatcagatgtgttatgagcgagccctccactggtatgccaagtatttcccttaccttgtcctcatccataccctggtctttatgctctgcagtaacttttggttcaaattccctggttccagctccaaaatagaacatttcatctccattctggggaagtgttttgactctccttggaccacacgggctttatctgaagtgtctggggaggactcagaagaaaaggacaacaggaagaacaacatgaacaggtccaacaccatccaatctggtccagaaggcagcctggtcaactctcagtctttaaagtccattcctgagaagtttgtagttgataaatccactgcaggggctctggataaaaaggaaggtgagcaggctaaggccttatttgagaaggtgaagaagttcaggctgcatgtggaagaaggtgatattctatatgccatgtatgttcgccagactgtacttaaagttatcaaattcctaatcatcattgcatataatagtgctctggtttccaaggtccagtttacagtggactgtaatgtggacattcaggacatgactggatataaaaacttttcttgcaatcataccatggcacacttgttctcaaaactgtccttttgctatctgtgctttgttagtatctatggattgacgtgcctttataccttatactggctgttctaccgttctctacgggaatattcctttgagtatgtccgtcaggagactggaattgatgatattccagatgtgaaaaatgactttgcttttatgcttcatatgatagatcagtatgaccctctctattccaagagatttgcagtgttcctgtctgaagtcagtgaaaacaaattaaagcagctgaacttaaataacgaatggactcctgataaactgaggcagaagctacagacaaatgcccataatcgactggaattgcctcttatcatgctctctggccttccagacactgtttttgaaatcacagagttgcaatctctaaaacttgaaatcattaagaacgtaatgataccagccaccattgcacagctagacaatcttcaagagctctctctgcaccagtgttctgtcaaaatccacagtgcggcgctctctttcctgaaggaaaacctcaaggtcttgagcgtcaagtttgatgacatgagggaactccccccctggatgtatgggctccgaaatctggaagagctgtacctagttggctctctaagtcatgatatttccagaaatgtcacccttgagtctctgcgggatctcaaaagccttaaaattctctctatcaaaagcaacgtttccaaaatccctcaggcagtggttgatgtttccagccatctccagaagatgtgcatacataatgatggcaccaagctggtgatgctcaacaacttaaagaagatgaccaatctgacagagctggagctggtccactgtgacctggagcgtattcctcatgctgtgttcagcctactcagcctccaggaattggacctgaaggaaaacaatctgaaatctatagaagaaatcgttagctttcagcacttaagaaagttgacagtgctaaaactgtggcataacagcatcacctacatcccagagcatataaagaaactcaccagcctggaacgcctgtcctttagtcacaataaaatagaggtgctgccttcccacctcttcctatgcaacaagatccgatacttggacttatcgtacaatgacattcgatttatcccccctgaaattggagttctacaaagtttacagtatttttccatcacatgtaacaaagtggaaagccttccagatgaactctacttctgcaagaaacttaaaactctgaagattggaaaaaacagcctatctgtactttcaccgaaaattggaaatttgctatttctttcctacttagatgtaaaaggtaatcactttgaaatcctccctcctgaactgggtgactgtcgggctctgaagcgagctggtttagttgtagaagatgctctgtttgaaactctgccttctgacgtccgggagcaaatgaaaacagaataacttatttttcgttaaagtttgactgaaacacgcttctacc

SEQ ID NO: 459 - DNA, 1956 bp, Homo sapiens
gtgcgtgagtttggtggcggccggctgtgcagagacgccatgtaccggctcatgtcagcagtgactgcccgggctgccgcccccgggggcttggcctcaagctgcggacgacgcggggtccatcagcgcgccgggctgccgcctctcggccacggctgggtcgggggcctcgggctggggctggggctggcgctcggggtgaagctggcaggtgggctgaggggcgcggccccggcgcagtcccccgcggcccccgaccctgaggcgtcgcctctggccgagccgccacaggagcagtccctcgccccgtggtctccgcagaccccggcgccgccctgctccaggtgcttcgccagagccatcgagagcagccgcgacctgctgcacaggatcaaggatgaggtgggcgcaccgggcatagtggttggagtttctgtagatggaaaagaagtctggtcagaaggtttaggttatgctgatgttgagaaccgtgtaccatgtaaaccagagacagttatgcgaattgctagcatcagcaaaagtctcaccatggttgctcttgccaaattgtgggaagcagggaaactggatcttgatattccagtacaacattatgttcccgaattcccagaaaaagaatatgaaggtgaaaaggtttctgtcacaacaagattactgatttcccatttaagtggaattcgtcattatgaaaaggacataaaaaaggtgaaagaagagaaagcttataaagccttgaagatgatgaaagagaatgttgcatttgagcaagaaaaagaaggcaaaagtaatgaaaagaatgattttactaaatttaaaacagagcaggagaatgaagccaaatgccggaattcaaaacctggcaagaaaaagaatgattttgaacaaggcgaattatatttgagagaaaagtttgaaaattcaattgaatccctaagattatttaaaaatgatcctttgttcttcaaacctggtagtcagtttttgtattcaacttttggctataccctactggcagccatagtagagagagcttcaggatgtaaatatttggactatatgcagaaaatattccatgacttggatatgctgacgactgtgcaggaagaaaacgagccagtgatttacaatagagcaagattttatgtttacaataaaaagaaacgtcttgtcaacacaccttacgtggataactcctataaatgggctggtggtggatttctgtctacagtgggtgaccttctgaaatttgggaatgcaatgctttatggttaccaagttgggctgtttaagaactcaaatgaaaatcttttacctggatacctcaaaccagaaacaatggttatgatgtggaccccagtccctaacacagagatgtcttgggataaagagggtaaatatgcaatggcgtggggtgttgtggaaaggaaacaaacgtatggttcgtgtagaaagcaacggcattatgcttcacatactggaggggcagtgggtgccagtagtgtcctgctggtccttcctgaagaactggatacagagactataaataacaaggttcccccaagaggaatcattgtttctatcatatgtaacatgcaatctgttggcctcaatagcaccgctttgaagattgcccttgaatttgataaagacagatcagactgataaccttaacaccataggtgcaaaatgagttgttctgaggtttttttgaaacattaaagttccaaaacatgacatttttaagaataaatttgaaatagagtataactgaatgcagagaattatgtacctctaattgcttaattttgtaatggtcttttattgtagaattggttctttatactcagggaagtaattatattgtttttactttttgaaaaaagtgttaactcttgaaataaaatattctgataaaataaaaaaaaaaaaaaaaaa

SEQ ID NO: 460 - DNA, 2048 bp, Homo sapiens
gcacagtggcccttaagcgaggagcggcggcgcccgcagcaatcacagcagtgccgacgtcgtgggtgtttggtgtgaggctgcgagccgccgcgagttctcacggtcccgccggcgccaccaccgcggtcactcaccgccgccgccgccaccactgccaccacggtcgcctgccacaggtgtctgcaattgaactccaaggtgcagaatggtttggaaagtagctgtattcctcagtgtggccctgggcattggtgccgttcctatagatgatcctgaagatggaggcaagcactgggtggtgatcgtggcaggttcaaatggctggtataattataggcaccaggcagacgcgtgccatgcctaccagatcattcaccgcaatgggattcctgacgaacagatcgttgtgatgatgtacgatgacattgcttactctgaagacaatcccactccaggaattgtgatcaacaggcccaatggcacagatgtctatcagggagtcccgaaggactacactggagaggatgttaccccacaaaatttccttgctgtgttgagaggcgatgcagaagcagtgaagggcataggatccggcaaagtcctgaagagtggcccccaggatcacgtgttcatttacttcactgaccatggatctactggaatactggtttttcccaatgaagatcttcatgtaaaggacctgaatgagaccatccattacatgtacaaacacaaaatgtaccgaaagatggtgttctacattgaagcctgtgagtctgggtccatgatgaaccacctgccggataacatcaatgtttatgcaactactgctgccaaccccagagagtcgtcctacgcctgttactatgatgagaagaggtccacgtacctgggggactggtacagcgtcaactggatggaagattcggacgtggaagatctgactaaagagaccctgcacaagcagtaccacctggtaaaatcgcacaccaacaccagccacgtcatgcagtatggaaacaaaacaatctccaccatgaaagtgatgcagtttcagggtatgaaacgcaaagccagttctcccgtccccctacctccagtcacacaccttgacctcacccccagccctgatgtgcctctcaccatcatgaaaaggaaactgatgaacaccaatgatctggaggagtccaggcagctcacggaggagatccagcggcatctggatgccaggcacctcattgagaagtcagtgcgtaagatcgtctccttgctggcagcgtccgaggctgaggtggagcagctcctgtccgagagagccccgctcacggggcacagctgctacccagaggccctgctgcacttccggacccactgcttcaactggcactcccccacgtacgagtatgcgttgagacatttgtacgtgctggtcaacctttgtgagaagccgtatccgcttcacaggataaaattgtccatggaccacgtgtgccttggtcactactgaagagctgcctcctggaagcttttccaagtgtgagcgccccaccgactgtgtgctgatcagagactggagaggtggagtgagaagtctccgctgctcgggccctcctggggagcccccgctccagggctcgctccaggaccttcttcacaagatgacttgctcgctgttacctgcttccccagtcttttctgaaaaactacaaattagggtgggaaaagctctgtattgagaagggtcatatttgctttctaggaggtttgttgttttgcctgttagttttgaggagcaggaagctcatgggggcttctgtagcccctctcaaaaggagtctttattctgagaatttgaagctgaaacctctttaaatcttcagaatgattttattgaagagggccgcaagccccaaatggaaaactgtttttagaaaatatgatgatttttgattgcttttgtatttaattctgcaggtgttcaagtcttaaaaaataaagatttataacagaacccaaaaaaaaaaaaaaaaaaaaaaaaaaaaaaa

SEQ ID NO: 461 - DNA, 2255 bp, Homo sapiens
cctccgagaggggagaccagcgggccatgacaagctccaggctttggttttcgctgctgctggcggcagcgttcgcaggacgggcgacggccctctggccctggcctcagaacttccaaacctccgaccagcgctacgtcctttacccgaacaactttcaattccagtacgatgtcagctcggccgcgcagcccggctgctcagtcctcgacgaggccttccagcgctatcgtgacctgcttttcggttccgggtcttggccccgtccttacctcacagggaaacggcatacactggagaagaatgtgttggttgtctctgtagtcacacctggatgtaaccagcttcctactttggagtcagtggagaattataccctgaccataaatgatgaccagtgtttactcctctctgagactgtctggggagctctccgaggtctggagacttttagccagcttgtttggaaatctgctgagggcacattctttatcaacaagactgagattgaggactttccccgctttcctcaccggggcttgctgttggatacatctcgccattacctgccactctctagcatcctggacactctggatgtcatggcgtacaataaattgaacgtgttccactggcatctggtagatgatccttccttcccatatgagagcttcacttttccagagctcatgagaaaggggtcctacaaccctgtcacccacatctacacagcacaggatgtgaaggaggtcattgaatacgcacggctccggggtatccgtgtgcttgcagagtttgacactcctggccacactttgtcctggggaccaggtatccctggattactgactccttgctactctgggtctgagccctctggcacctttggaccagtgaatcccagtctcaataatacctatgagttcatgagcacattcttcttagaagtcagctctgtcttcccagatttttatcttcatcttggaggagatgaggttgatttcacctgctggaagtccaacccagagatccaggactttatgaggaagaaaggcttcggtgaggacttcaagcagctggagtccttctacatccagacgctgctggacatcgtctcttcttatggcaagggctatgtggtgtggcaggaggtgtttgataataaagtaaagattcagccagacacaatcatacaggtgtggcgagaggatattccagtgaactatatgaaggagctggaactggtcaccaaggccggcttccgggcccttctctctgccccctggtacctgaaccgtatatcctatggccctgactggaaggatttctacgtagtggaacccctggcatttgaaggtacccctgagcagaaggctctggtgattggtggagaggcttgtatgtggggagaatatgtggacaacacaaacctggtccccaggctctggcccagagcaggggctgttgccgaaaggctgtggagcaacaagttgacatctgacctgacatttgcctatgaacgtttgtcacacttccgctgtgagttgctgaggcgaggtgtccaggcccaacccctcaatgtaggcttctgtgagcaggagtttgaacagacctgagccccaggcaccgaggagggtgctggctgtaggtgaatggtagtggagccaggcttccactgcatcctggccaggggacggagccccttgccttcgtgccccttgcctgcgtgcccctgtgcttggagagaaaggggccggtgctggcgctcgcattcaataaagagtaatgtggcatttttctataataaacatggattacctgtgtttaaaaaaaaaagtgtgaatggcgttagggtaagggcacagccaggctggagtcagtgtctgcccctgaggtcttttaagttgagggctgggaatgaaacctatagcctttgtgctgttctgccttgcctgtgagctatgtcactcccctcccactcctgaccatattccagacacctgccctaatcctcagcctgctcacttcacttctgcattatatctccaaggcgttggtatatggaaaaagatgtaggggcttggaggtgttctggacagtggggagggctccagacccaacctggtcacaaaagagcctctcccccatgcatactcatccacctccctcccctagagctattctcctttgggtttcttgctgctgcaattttatacaaccattatttaaatattattaaacacatattgttctct

SEQ ID NO: 462 - DNA, 4253 bp, Homo sapiens
tcagacatggcggcggatctaaacctggagtggatctccctgccccggtcctggacttacgggatcaccaggggcggccgagtcttcttcatcaacgaggaggccaagagcaccacctggctgcaccccgtcaccggcgaggcggtggtcaccggacaccggcggcagagcacagatttgcctactggctgggaagaagcatatacttttgaaggtgcaagatactatataaaccataatgaaaggaaagtgacctgcaaacatccagtcacaggacaaccatcacaggacaattgtatttttgtagtgaatgaacagactgttgcaaccatgacatctgaagaaaagaaggaacggccaataagtatgataaatgaagcttctaactataacgtgacttcagattatgcagtgcatccaatgagccctgtaggcagaacttcacgagcttcaaaaaaagttcataattttggaaagaggtcaaattcaattaaaaggaatcctaatgcaccggttgtcagacgaggttggctttataaacaggacagtactggcatgaaattgtggaagaaacgctggtttgtgctttctgacctttgcctcttttattatagagatgagaaagaagagggtatcctgggaagcatactgttacctagttttcagatagctttgcttacctctgaagatcacattaatcgcaaatatgcttttaaggcagcccatccaaacatgcggacctattatttctgcactgatacaggaaaggaaatggagttgtggatgaaagccatgttagatgctgccctagtacagacagaacctgtgaaaagagtggacaagattacatctgaaaatgcaccaactaaagaaaccaataacattcccaaccatagagtgctaattaaaccagagatccaaaacaatcaaaaaaacaaggaaatgagcaaaattgaagaaaaaaaggcattagaagctgaaaaatatggatttcagaaggatggtcaagatagacccttaacaaaaattaatagtgtaaagctgaattctctgccatctgaatatgagagtgggtcagcatgccctgctcagactgtgcactacagaccaatcaacttgagcagttcagagaacaaaatagtcaatgttagcctggcagatcttagaggtggaaatcgccccaatacagggcccttatacacagaggccgatcgagtcatacagagaacaaattcaatgcagcagttggaacagtggattaaaatccagaaggggaggggtcatgaagaagaaaccaggggagtaatttcttaccaaacattaccaagaaatatgccaagtcacagagcccagattatggcccgctaccctgaaggttatagaacactcccaagaaacagcaagacaaggcctgaaagtatctgcagtgtaaccccttccactcatgacaagacattaggacccggagcggaggagaaacggaggtccatgagagatgacacaatgtggcagctctacgaatggcagcagcgtcagttttataacaaacagagcaccctccctcgacacagtactttgagtagtcccaaaaccatggtaaatatttctgaccagacaatgcactctattcccacatcaccttcccacgggtcaatagctgcttatcagggatactcccctcaacgaacttacagatcggaagtgtcttcaccaattcagagaggagatgtgacaatagaccgcagacacagggcccatcaccctaagcatgtctatgtgcctgacagaaggtcagtgccagctggcctgactttacagtctgttagtccccagagcctccaagggaaaacgctgtcacaagatgaaggtagaggcacattatacaaatacagacctgaagaagtagatattgatgccaagttaagccgattatgtgaacaagataaagtggtgcatgctctggaagagaaacttcagcaactccacaaggagaaatacacgcttgagcaagctttgctatcagccagccaagagatagaaatgcatgcagataacccagcagccattcagacagtggtgttacaaagggatgatttacaaaatggactgcttagtacgtgtcgagaactttctcgagccactgccgaattggaacgagcatggagagaatatgataagttagaatacgatgtaactgttaccaggaaccagatgcaagagcagctggatcaccttggtgaagttcagacggaatcagcaggaattcagcgtgcacagattcagaaagaactttggcgaattcaggatgtcatggaagggctgagtaaacataagcagcaaagaggtactacagaaataggtatgataggatcaaagcctttctcaacagttaagtacaaaaatgagggtccagattatagactctacaagagtgaaccagagttaacaacagtggcagaagttgatgaatctaatggagaagaaaaatcagaacctgtttcagagatagaaacttcagttgttaaaggttcccactttcctgttggagtagtccctccaagagcaaaatcaccaacacccgaatcttcgacaatagcttcctatgtaaccttgaggaaaactaagaagatgatggatctaagaacggaaagaccaagaagtgcagtggaacagctctgtttggctgaaagtactcgaccaaggatgactgtggaagagcaaatggaaagaataagaagacatcaacaagcgtgcctgagggagaagaaaaaagggttaaatgttatcggtgcttcagaccagtcacccttacaaagcccttcaaatttaagggataatccatttaggactactcagactcgaaggagggatgataaggaactggacactgccattagagaaaatgatgtaaagccagaccatgaaactcctgcaacagaaattgttcaactaaaagaaaccgaaccccaaaatgtggacttcagcaaagagttaaaaaaaactgaaaacatttcatatgaaatgctttttgaacctgagccaaatggagtaaattctgtggaaatgatggataaagaaagaaacaaagacaaaatgcctgaggatgttacattcagccctcaagatgaaacacagaccgcaaatcataaaccagaagagcatcctgaagaaaatacaaagaacagtgttgacgaacaggaagaaactgttatttcttacgaatcaactcctgaggtttctagaggaaatcaaacaatggcagtgaaaagtctgtccccatctcctgagtcctcggcatcgccagttccatccactcagccgcagctcacagaaggatcacatttcatgtgtgtgtagtcttagaagaactatactgacttctgttgaaaccattcaaagctaaagacatggaccttcagcagtgtaagaagatattgtacagtatattttaaatctatgaaattcatagttctgatgcttttggtcacagagcatcattttatcacttctggaaaatgtttattccaaaacagctttaatggcccatatgtacacttcgtaatctcaaggttattattctgacaccagcttgctgctatgatttcagagcacataagtaaaggtgctttttaatgtgcagtctatttccagagcttacttagttgctgatttccagatttcgatgtttcttaagtctaggtgaatttatatatatatttttttgcttttcattttctaaagttagttattatttccattgaagcttgttttctttttttcttcccattttagctactgcagtgcttttgtttcacacttgatttgtaaaaattttatatatatgtatttaaaatgtgccattttattgctaagtgaagtatgtcctgttttctgctataattctttctcggtcagattgcaatgtcagcagttactgccacactcctgtcagcttaaacacaaatgttactgcttatcttttcttaaaaaaaaaaaaaacaaagtgtaggtattttgaagtactgggcttatatttcattggaatacatgtgtacagcaataagcaggtttccaaatccggtacttagtttgtgtacaaatgtaattatgttcattgtgtatatattatacaatgagcacatgtaatgtattaaaggctacttactattgtttaaatgcaaatgttcatatctcatttctttttttatcatgttaaataaatgttgatgttcttaaaaaaaaaaaaaaaaaaa

SEQ ID NO: 463 - DNA, 2381 bp, Homo sapiens
ggagtaacagtgtcgccgccgccttcctcctcctcctctcgccgctaccgccgtcgccgccgccgcagccgccgccggtccgcgcggcctcgggtggccggagctcagcctgcgcgcgccgcgccctgtgtctccgggtggggcagaagactcgccccttgaacctcccgcggggactctccgtggtgtggcggccctggggctctttcttaatagccccggactgagtcccctccagtcgaggaccctctcctagtccactgacgagcggtggacacctgccgctgtatctcccccaaaccgagtccttgccctgctgcctcctcatacccacacggcggcagagaccttcaccatagcgttcgctcaactccagaaccttccgacctccgctagttcctgcgggcctttgcccgcttcccggtgcaccctccccgggagacacctcagacccccgacagcctgggcaggctcggtgcctgcgggtgcgttcctgatcacccctcccctcttccctccccctcatcctccattcccttgttttcaccctctgtcctctgcccgtcactccccttgtcacctcttggagccccctcctaaccagcggccagtgggtttcccataccccaggatgtgagcctctttaacctgtaatgctgtggctagcccttggcccctttcctgccatggagaaccaggtgctggtaattcgcatcaagatcccaaatagtggcgcggtggactggacagtgcactccgggccgcagttactcttcagggatgtgctggatgtgataggccaggttctgcctgaagcaacaactacagcatttgaatatgaagatgaagatggtgatcgaattacagtgagaagtgatgaggaaatgaaggcaatgctgtcatattattattccacagtaatggaacagcaagtaaatggacagttaatagagcctctgcagatatttccaagagcctgcaagcctcctggggaacggaacatacatggcctgaaggtgaatactcgggccggaccctctcaacacagcagcccagcagtctcagattcacttccaagcaatagcttaaagaagtcttctgctgaactgaaaaaaatactagccaatggccagatgaatgaacaagacatacgatatcgggacactcttggtcatggcaacggaggcacagtctacaaagcatatcatgtcccgagtgggaaaatattagctgtaaaggtcatactactagatattacactggaacttcagaagcaaattatgtctgaattggaaattctttataagtgcgattcatcatatatcattggattttatggagcattttttgtagaaaacaggatttcaatatgtacagaattcatggatgggggatctttggatgtatataggaaaatgccagaacatgtccttggaagaattgcagtagcagttgttaaaggccttacttatttgtggagtttaaagattttacatagagacgtgaagccctccaatatgctagtaaacacaagaggacaggttaagctgtgtgattttggagttagcactcagctggtgaattctatagccaagacgtatgttggaacaaatgcttatatggcgcctgaaaggatttcaggggagcagtatggaattcattctgatgtctggagcttaggaatctcttttatggagcttgctcttgggaggtttccatatcctcagattcagaaaaaccagggatctttaatgcctctccagcttctgcagtgcattgttgatgaggattcgcccgtccttccagttggagagttctcggagccatttgtacatttcatcactcagtgtatgcgaaaacagccaaaagaaaggccagcacctgaagaattgatgggccacccgttcatcgtgcagttcaatgatggaaatgccgccgtggtgtccatgtgggtgtgccgggcgctggaggagaggcggagccagcaggggcccccgtgaggctgccgcagggcactgaaagcccaggaccagtaaccaaggagaacaacccacccgtcgcccttctccgtatgctgcctgcgccagaagagctttgctgggccctggcttccctgccctcgccttcacctctgtcagcaggtggccttgcctggggagccccatgtgtggcccaccccaccaggccatccccataccttctggtttgaaggcgctgacactggcagagaggtaaagggtggggcattgagaatggaggctcccagggtccctgcccacttctgttttcctaatgtttttctctataaagggtcaggcccgtcagcatcactgatgggaataaaagtattaatgctttgtgacaaaaaaaaaaaaaaaaaa

SEQ ID NO: 464 - DNA, 3063 bp, Homo sapiens
ggccggcttccggcccggcgaggtttgagcgcgtccgcgggctgggaggccgctggacccgggcgcatggcctcccccgggcagttatctccttgccgcgaccttgaggtcttcggtaagaactggcgttcctctttctaacgccggctttcggccttcgcccttgacgcccaggcccggggaggccgtcactcagaaactgctccatccgagtccgccgcctcggagatgccgagagcctggtcctgccctctgcccccggccccttcctagactcactacttcaggtcactaaaggcgcctcccaccagtttgacttctgttctgcctctgcgccccgctctggcctctcctaagccgcttccctggccatgtctttagagttcgctccccgccacccctcgggcgcccgccttctgtgcgacccttccccccacttcctggttgggctcctggatcccaggacgtacctgcagcagcagcttgacccgctcgatgggcgctaccgccgtcttggagatggctgcggccactccacctgccaggaagtccttggcgaaggacacagcggcatctgtcatgttgaaagaggaggcagactgctgcaggacgggactgggccgggaaccggctttgactccggcgctgcggggcggagcgaagcaaatggccgatttatatagggggagccggagctggagcggcaggcgtcggaggcggggccggggcggggtctgggccccggcgcgctgggcggcagagccgctgagtggcccagctcgcaggaggaggagtcgtggagggcgggccgggactgctctccgcgccgcccgtgctcgccctcggcacctgacccggcgagaggaaggggcgggtccagagaacacccgggacttgaacgctggaccctgagagaggcctcggagaggggaggaagggtgaggtcacgatgtgcctggacaaaaacccttggagcaggaccaggactagggtgagacgcatttgctacagggatgccaaaagaacccttcagtcatcgagataaacagtagtcaatgcgatactttaaaaaagtcgtatgggcaaactacatcctactggccggcccccttgttttgtaaataaagtttaattggagtgtcaaggctgggtttagggtgaggcaagcgagacaaggtcatgcaagtgcaggttgggatcctgtctgtatttcaaatgttgatcatttgttcatcatggatttttgcattgcttctgatttttttaaaatagtacatgaaaaatcatttgtcttaattactgagttgtttttcaccaaggtgaatgcctcactcttcccactctagaccgtgtgctgtcctggagccagtgaaaccagacgaaattaagggaacagcagacgaaggaactgccaccgtgccccagaccctggtttgcaaatacagttcgacaaagatcttgccaggaattggcctgggagagtccaaaggactgggctgggggtggggaaatgattttagccagaagacaaatatagaggttgtacccagaaggttaagaggcttaggaaggttaagaactacgttaacatttggctcccaggaccccaggtaaagtgcccttggattgaatagatttctgaactccagaaacatttagaggaatcaatagaattagattggcagccattgtgccaatggacaagtgcttactgagccccttaatcccttcactgggtaagcatttgccacacatgtcctcaaaaacctacttgttagcttaagtggactccctcaagttcagaacaggagcaaatagtgtaatcacaagttccgtgtctgaataatcataacaatgtttataaaaataaggacgactgttgaaaactgcaactgcagctgaaccttatgtgcccagacttcagaattcccataggcaaaatgccagcaggcctttgcacactgaacacatagtgttcatatccttcactttcctttcctgccctctcctatcttctccagatctgcctgtgaaaggacccaattctaggaccccccaggatggttaggcccttcctctgaaagtacactttgcaatttgttagtctcctcaagaaccccggcgatcgaaactgatgcacacaaattgcatgtgttcaaaggagcaattttgaatctagctttgttgatcctgggagaaatctttgacctgtgttagtgaaaggctatggtgtttctcagctgattataatagcgaggtagctgaatgcaaaaaaacagtttcagagaatggtagagtatatcctccaaaggtgatactcgcttctctattctggtgagagaaacaagagctaaagcaaaattctacagagggctttatttggagagaggtggattttatttataatgcatttaaaattcaaaatctttctagtttgaactcttgacattctgattaatgcatttttattcaactgttaattattcctcgatacacctcgccatcacttgtgtatcccttttctacatgtgacctttccctggccacatctgctactctctttgagcatgatgcctctactgtattctattccagagctcattgttttgtcagttttttttctctccacaaaaaaagatgatcaaataattacatagaatttttcccttctcagtctttgggtaactaagtgtggttttattgacgatgaaatacaagatgggtcatttaaaagcaacttcttgtcatcacttggtattttgctaaatccacggtgagctggagctcccgtagtcacctatcaccgcgtgtattttaaggagtcagatattctcgaaactgttaagatcatgaaagacaaagagactaaggaactgtcacagattaaaggagactaaagatacttgacaactgaatgtaatatatgacactcaaccggctcctgtaccagaaaaaggacattggttatattggtgaggtttgaatatctgtagattaccaatactattcttggttatggtggttatgtaagatttagagaagttgaataaaggatataaggac

SEQ ID NO: 465 - DNA, 4710 bp, Homo sapiens
cgtcgccgccgctgctgccgccgccgctgccacagcctttgccgccacggtctccgccgccgctgtcctcgcgctgcctctgggagcctccattgttccagcagcgcccggtcccgagaccgggcatcttgggggctcgcgaaacgggcggcggccgacggagttgagaccccagggcgccggcgggaccaggagcggcaggggtcagctcaggaatcccggggagccgggaccaaagcgtggggcggcagggggccggggtggcgaggtctacggtctccggagttggggctcccccttcccggcccgactttccccgccgacctccccaagtggggtcggagccccggcgggcgcccccggcgatgagcccggactcgaggtggccgatgtgacagcatgggggtggactttgatgtgaagactttctgccacaacttgcgggcgactaagccaccatacgagtgcccggtggagacctgccgaaaggtctacaagagttacagtggtattgagtaccacctgtaccactatgaccacgacaacccaccacccccacaacaaactccactccgcaagcacaagaaaaaggggcgccagtcacgcccagccaacaagcagtcacccagcccctcagaggtctcacagtcaccaggccgtgaggtgatgagctatgcacaggcccagcgcatggtggaggtggacttgcatggccgcgtccaccgcatcagcatctttgacaacctggatgtggtgtcagaggatgaggaagcccccgaggaggcccctgagaatggcagcaacaaggagaacactgagacaccagctgctactcccaagtcaggcaaacataagaacaaggagaagcgcaaggactccaaccatcaccaccaccacaatgtttctgcgagcaccactcccaagctgccagaggtggtctatcgggagctggaacaggacacccctgatgccccaccccggccaacttcctattaccggtacatcgagaagtctgcagaggagctggacgaggaagtagagtatgacatggacgaggaggactacatctggctggatatcatgaatgagcgtcggaagacagagggtgtaagtcccatcccgcaggagatctttgagtacctaatggaccgactggagaaggagtcgtactttgagagtcataataaaggcgaccctaatgcgctagtggacgaggatgctgtttgctgtatctgcaatgatggtgagtgccagaacagcaatgtcatcctcttctgtgacatgtgcaacctggccgtgcaccaggagtgctacggtgtcccctatatccctgagggccagtggctgtgccgccgttgcctgcagtcaccctctcgtgctgtggattgtgccctgtgccccaacaagggcggtgccttcaagcagacagatgacgggcgctgggcccatgtggtgtgtgccttgtggatccctgaggtctgcttcgccaacacggtcttcctagagcctattgacagcattgagcacatcccaccagctcgctggaagctcacctgctacatttgcaaacaacggggctcaggggcctgcatccagtgccacaaggccaactgttacacagctttccatgtgacatgcgcccagcaggctggcctttacatgaagatggagcctgtgcgggagacaggcgccaacggcacctctttcagtgtccgcaagacagcctactgcgacatccacacgcctccaggttcagcacgccgactgcctgccctgtcccacagcgagggtgaggaggatgaagatgaggaggaggatgagggtaagggctggagctcagagaaagtcaagaaggccaaggccaagtcccggatcaaaatgaagaaggcacggaagatcctggcagagaagcgggcagcagcacctgtggtgtcagtgccctgcatcccaccacacaggcttagtaaaatcaccaaccgcctgaccatccaaaggaagagccagttcatgcagaggctgcacagctactggacactgaagcggcagtcacggaatggggtcccattgctacgtcgcctgcagacacacctgcaatctcagaggaactgtgaccaagttgggagagattctgaggataagaactgggcccttaaagaacagctcaagtcctggcagcggctccggcatgacttggagcgagctcggctgctcgtggaattgatccgcaagcgggaaaaactcaaaagggagacgatcaaggttcagcagattgccatggagatgcagctgactcctttcctcatcctccttcgcaaaaccttggagcagctccaagagaaggacacaggcaacatcttcagcgagccggtccctctgtctgaggtacctgactacctagaccacatcaaaaagcccatggactttttcaccatgaagcagaacttggaggcttaccgctacctgaattttgatgattttgaggaggacttcaacctcatcgtcagcaactgcctcaagtataacgccaaggacaccatcttctaccgggcagcagtgcggcttcgtgagcagggtggtgctgtgctccgccaggcccggcgccaggcagaaaaaatgggcattgactttgagacgggcatgcatatcccccacagcctggctggagatgaggccacacaccacactgaagatgcagccgaggaagagcggctggtcttgctggagaaccagaagcacctgccagtggaagaacagctaaagctgcttctggagcggctggacgaagtgaatgccagcaagcagagtgtgggccgctcacggcgtgcaaagatgatcaagaaagagatgacggcactgcggcggaagcttgcccatcagcgagagacgggacgtgatggccctgagcggcatggcccctcgagccggggtagtctgacaccccacccggcagcctgtgacaaggatgggcagacagatagtgcggcagaggagagcagcagccaggagacaagcaaaggcctgggtcccaacatgtcctcaacccccgcacatgaggtgggcaggagaacctcagttctgttctccaaaaagaacccgaagacagctggaccgcccaagaggccgggccggccccccaaaaaccgggagagccagatgacccccagccacggaggcagtcctgtggggcccccccagctccccatcatgagttccctgcgtcagcgcaagcggggtaggagcccccggcccagttcgagctcagacagcgacagtgataagtccacagaagaccccccaatggacttaccagccaatggcttcagcggtggaaaccaaccagtgaagaagagtttcttggtataccgtaatgactgcagccttccccggagcagctcagactctgagtccagcagcagtagcagtagcagcgctgcttcagaccggaccagcacaacgccctcaaaacaaggccggggcaaaccctccttctctcggggcactttcccagaggacagcagtgaggatacctcaggcactgagaatgaggcctactccgtgggcactggccgcggcgtgggccacagcatggtaaggaagagtctgggccggggagctggctggctgtcagaggatgaggactccccgctggatgctctggacctcgtgtgggccaaatgccgaggctatccatcatacccagctctgatcattgatccaaagatgccccgagaaggtatgttccaccatggggttcccatccctgtgcccccactggaggtgctgaaacttggggagcagatgacccaggaagcccgagagcatctctacctcgtcctcttctttgacaacaaacgaacctggcagtggctgcccaggaccaagctggttcctctgggtgtgaaccaggacctagacaaggagaagatgctggagggccgcaagtccaacatccgcaagtcagtacagatcgcctaccacagggctctgcagcaccgcagcaaggtgcaaggcgagcagagcagtgagaccagcgatagtgattgatactgctcaacacagcccaacctatagtgccctgtgacttctctcctcccctttgctcactgtcctggagtggcaccggcctctgcactgactcatttctggtcttggggccagtctcaggggaagctgggtgggggaggtccctcctgccctaagtgcagctggactgtacagaacactccaagggccaatggcagttcagcgcaaggagagggagggcccacaggtcagaaaaagctccagagacctcacagcattgtagggcggggtggtgggccaaagttaggacactgcgtaaaacaggccatcccaccacctctacctgctcatgccaggagaatccataactgcctagaggcctggggcccctaccggtcgtgaggtgagtgggcatctgtccagcctggaagaggggcactaggtgactccctcccctgctgttgtaaatactgtaattatcggagaatttaaattattctcatttgtaactgcgtttccgggtcgcgccagagtcatttggtactaaaaaaaaaaaaaaaaaagactgggggctgtccccatttcccttctctttcccatagattcccccacctttcaaactggtttgtatttatttcaaaggaagaaaatatattgattcttagaaaataaactgtcaatttagaa

SEQ ID NO: 466 - DNA, 2875 bp, Homo sapiens
agaactagtccgctcggcgcccagagcctcgcattacttcccctagctccgccaagcctcgctgcatacgcgcccgcgcgcagtccgccgtcgcgcccctatgacgtcacccacgcgccaccgcttccgggctggggactgggggcggggccgcgcggagggcaagccgggggcggggccggggccagagcagatctccgggcctccgcggccatagctgactgtgccgtcccttcccctcacccgctccacgccctcctgggccgagtggagttgggtggtgtcgggagcctctccctgaggggcaccgcggcttcaggagctgggcctccagtgcggcgcgatgtcaggcgcggtgacagctctgtgagtccgaggccgcggccgtggcgctgggcggctgcggggcctgaccggtccgctcatggtgccgccacgacgccatcgcggggcaggaaggccaggggtgctgagttcttcacctccttttagactgagatctgccaagttttccggcattgctcttgaggatctcagaagggctcttaagacaagactgcaaatggtgtgtgtatttgtcatgaaccgaatgaattcccagaacagtggtttcactcagcgcaggcgaatggctcttgggattgttattcttctgcttgttgatgtgatatgggttgcttcctctgaacttacttcgtatgtttttacccagtacaacaaaccattcttcagcacctttgcaaaaacatctatgtttgttttgtaccttttgggctttattatttggaagccatggagacaacagtgtacaagaggacttcgcggaaagcatgctgctttttttgcagatgctgaaggttactttgctgcttgcacaacagatacaactatgaatagttctttgagtgaacctctgtatgtgcctgtgaaattccatgatcttccaagtgaaaaacctgagagcacaaacattgatactgaaaaaacccccaaaaagtctcgtgtgaggttcagtaatatcatggagattcgacagcttccgtcaagtcatgcattggaagcaaagttgtctcgcatgtcatatcctgtgaaagaacaagaatccatactgaaaactgtggggaaacttactgcaactcaagtagcgaaaattagcttttttttttgctttgtgtggtttttggcaaatttgtcatatcaagaagcactttcagacacacaagttgctatagttaatattttatcttcaacttccggactttttaccttaatccttgctgcagtatttccaagtaacagtggagatagatttaccctttctaaactattagctgtaattttaagcattggaggcgttgtactggtaaacctggcagggtctgaaaaacctgctggaagagacacagtaggttccatttggtctcttgctggagccatgctctatgctgtctatattgttatgattaagagaaaagtagatagagaagacaagttggatattccaatgttctttggttttgtaggtttgtttaatctgctgctcttatggccaggtttctttttacttcattatactggatttgaggacttcgagtttcccaataaagtagtattaatgtgcattatcattaatggccttattggaacagtactctcagagttcctgtggttgtggggctgctttcttacctcatcattgataggcacacttgcactaagccttacaatacctctgtccataatagctgacatgtgtatgcaaaaggtgcagttttcttggttattttttgcaggagctatccctgtatttttttcattttttattgtaactctcctatgccattataataattgggatcctgtgatggtgggaatcagaagaatatttgcttttatatgcagaaaacatcgaattcagagagttccagaagacagcgaacagtgtgagagtctcatttctatgcacagtgtttctcaggaggatggagctagttagctgtctgttgtctgtagcccagcttgataatggaactatacagcgaagagacaatctctggcaagtttttgtagaaaaaatgtttcagtgcctagtctgaaaaataacagtttgagttctttgaaactctaaaatatatttttctcatacctgttttcttcattttcataatgaagcactttgctatgtagctgtgtacatatcactacagttataggaagtttcagtctacagtccatccaaaggaccaacctgccttacacatctcaaggaattcagctgttgaaatcatttgaactaatcaaggaataaatcctaatgttctgggactttattttcacatgttaaatgctggaatatattatgaaaatgttttcaagaaatcacttaagtgttcatagaccagtatttctgacaggtaaaatgctaaaataagctacctgtaataagtgtggattatatttttgggttttgtagaatattgcaaattaaccacacaaaaaatgtttaatttatgcaacaagcatgtttgtgcaaatttcatgggactttaaaaagaataagtatttgagaaaatatctggttcacttacactacatttactgtattattcttttatagcattaggtgccttgtattttaaatctgtgacaaaccatggcaaatttttaaaggggaagtattattataaaatgaagaaatatgtatttctaaaggctatattgctgtaaacttaattgataaagctctgtttaatttagagttttgaagaaatagtctcccttcaattaagaaattttcataatggaatgatttaaattgaagtgacaaagagtattattaaaatacaatgtttatacgtgtaaaaaaaaaaaaaaa

SEQ ID NO: 467 - DNA, 3257 bp, Homo sapiens
ctccctttgggaagctgcccgccgagtctccgagatttgtccctggtggtcccgcggacccctcgtccctccgcagtctccggctggcagcgatggagggcgctggggagaacgccccggagtccagctcctctgcccctgggtccgaagagtctgccagggatccacaggtgccgcctccggaggaagaatcgggggactgcgcccggtccctggaggcggtccccaagaaactctgtgggtatttaagtaagttcggcggcaaagggcccatccggggctggaaatcccgctggttcttctacgacgaaaggaaatgtcagctgtattactcgcggaccgctcaggatgccaatcccttggacagcatcgacctctccagtgcagtgtttgactgtaaggcggacgctgaggaggggatcttcgaaatcaagactcccagccgggttattaccctgaaggccgccaccaagcaagcgatgctgtactggctgcagcagctgcagatgaagcgctgggaattccacaacagcccgccggcacctcctgccacccctgatgccgccctggctgggaatgggcccgtcctgcacctcgagctagggcaagaagaggcagagctggaggagttcctgtgccctgtgaaaacaccccctgggctagtgggcgtggcagctgccttgcagcccttccctgcccttcagaatatttccctcaagcacctggggactgaaatacagaacacaatgcacaacatccgtggcaacaagcaggcccagggaacaggccatgaacctccaggggaagattctccacagagtggggagcctcagagggaggagcagcccttggcctctgacgccagcaccccagggagagagccagaggattctccaaagcctgcacccaagccttctctgaccatcagtttcgctcagaaagccaagcgccagaacaacaccttcccattcttttctgaaggaatcacacggaaccgaactgcccaggagaaagtggcagccttggagcaacaggttctgatgctcaccaaggagttaaagtctcagaaggagctagtgaagatcctgcacaaggcactggaggccgcccagcaggagaagcgggcgtccagcgcatacctggcggcggctgaggacaaggaccggctggagctggtgcggcacaaagtgcggcagatcgcggagctgggccggcgggtggaggccctggagcaggagcgggagagcctggcgcacacagcgagcctgcgggagcagcaggtgcaggagctacagcagcacgtgcagctgcttatggacaagaaccacgccaagcagcaggtcatctgcaagctctctgagaaggtcacccaggacttcacgcacccccctgaccagtctcctttgcgccccgacgctgccaacagggacttcctgagccagcaggggaagatagagcacctgaaggatgacatggaagcttaccggacccagaactgcttcctcaacttcgagatccaccaggtcacaaagatctggagaaaggtggctgagaaggagaaggcccttctgacgaagtgcgcctacctccaagccagaaactgccaggtggaaagcaagtacctggccggtctgagaaggctgcaggaggccctgggggacgaagccagcgagtgctcagagctgctgaggcagcttgtccaggaggcactgcagtgggaagctggggaggcctcatctgacagcatcgagctgagccccatcagtaagtatgatgagtacggcttcctgacggtgcccgactatgaggtggaagacctgaagctgctggccaagatccaggcattggagtcacgatcccaccacctgctgggcctcgaggctgtggatcggccgctgagggagcgctgggctgccctgggcgatcttgtgccctcagccgagctcaagcagctactgcgggcaggagtaccccgtgaacaccggcctcgtgtctggaggtggctggtccacctccgtgtccagcacctgcacactccaggctgctaccaggaactgctgagccggggccaggcccgcgagcaccctgctgcccgccagattgagctggacctgaaccggaccttccccaacaacaaacacttcacctgccccacctccagcttccccgacaagctccgccgggtgctgctggccttctcctggcagaaccccaccatcggctactgccagggcctgaacaggctggcggccattgccctgctggtcctagaggaggaggagagcgccttctggtgcctggtggccattgtggagaccatcatgcccgctgattactactgcaacacgctgacggcatcccaggtggaccagcgggtgctccaggacctgctctcggagaagctgcccaggctgatggcccatctggggcagcaccacgtggatctctccctcgtcaccttcaactggttcctcgtggtctttgcggacagtctcattagcaacatcctccttcgggtctgggatgccttcctgtacgaggggacgaagtacaacgagaaggagatcttgaggctacagaatggcctggaaatctaccagtacctgcgcttcttcaccaagaccatctccaacagccggaagctgatgaacatcgccttcaatgacatgaaccccttccgcatgaaacagctgcggcagctgcgcatggtccaccgggagcggctggaggctgagctgcgggagctggagcagcttaaggcagagtacctggagaggcgggcatcccggcgcagagctgtgtccgagggctgtgccagcgaggacgaggtggagggggaagcctgacttggccacctcccctccccacagccttcctcacccttggctggcagacccactggaggtcaggcacggaccagtggcccagccctgggtgtcccatcaccatgtgaccttggacatgtcccttcccctctctggccctcagtttccccactgggacattgtgtgctgcaaagccattggttgggctacttcttcataggcacttacttacccagggatgccaccctttcgtcacctcttccacagagcactttggcatgtaaacaagcaagagcactgcctctatagggtaacctggaacattctctaggttatatcaatataaaacaatgtaaatggtggaaaaaaaaaaaaaaaaaaaaaaaaaaaaaaaaaaaaaaaaaaaaaaaaaaaaaaaaaaaaaaaaaaaaa

SEQ ID NO: 468 - DNA, 2183 bp, Homo sapiens
atgagcaatcagtaccaggaggagggctgctccgagaggcccgagtgcaaaagtaaatctccaactttgctctcctcctactgcatcgacagcatcctgggccggaggagcccgtgcaaaatgcggttgctgggagccgcgcagagcttgcctgctccgctgaccagccgcgccgacccggaaaaggccgtgcaaggctcccctaagagcagcagcgccccgttcgaggccgagctgcacctgccgcccaagctgcggcgcctgtacggcccgggcgggggccgcctccttcagggtgcggcagcggcggcggcggcggcggcggcggcggcggcagcggccgccacggccacggcgggtccacgcggggaggcccctccgccgccaccgccaaccgcgcggcccggggaacggccggacggcgcaggggccgccgcggcagccgcggccgcggccgccgcggcctgggacacgctcaagatcagccaggcgccgcaggtgagcatcagccgcagcaagtcgtaccgcgagaacggggcgcccttcgtgccgccgccgcccgcgctggacgagctgggcggcccggggggcgtcacgcacccggaggagcgcctcggcgtggccggcggcccgggcagcgccccggctgcgggtggtggcaccggcaccgaggacgacgaggaggagctgctggaggacgaagaagatgaggacgaggaagaggaactgctggaggacgacgaggaggagctgctggaggacgacgcccgcgcgctgctcaaggagccccggcgctgtcctgtggccgccactggcgccgtggccgcagcagctgccgctgcagtggccacagagggcggggagctgtcacccaaggaggagctgctgctgcacccggaagacgctgagggcaaggacggcgaggacagcgtgtgcctctctgcgggcagcgactcggaggaggggctgctgaaacgcaaacagaggcgctaccgcaccacgttcaccagctaccagctggaggaactggagcgggccttccagaagacgcactacccggacgtcttcaccagggaggaactggccatgaggctggacttgaccgaggcccgagtccaggtctggttccagaaccgtcgggccaagtggcgcaagcgggagaaggcaggcgcgcagacccacccccctgggctgcccttcccggggccgctctccgccacccacccgctcagcccctacctggacgccagccccttccctccgcaccacccggcgctcgactccgcttggactgccgctgccgccgccgccgccgccgccttcccgagcctacctccgcctccgggctcggccagcctgccgcccagcggggcgccgctgggcctgagcactttcctcggagcggcagtgttccgacacccagctttcatcagcccggcattcggcaggctcttttccacaatggcccccctgaccagcgcgtcgaccgcggccgcgctcctgagacagcccacacccgccgtggagggcgcagtggcatcgggcgccctggccgacccggccacggcggccgcagacagacgcgcctctagcatagccgcgctgaggctcaaggccaaggagcacgcggcgcagctcacgcagctcaacatcctgccgggcaccagcacgggcaaggaggtgtgctaaaggctgccctccacacccgcgccccgcgcgcgccccgaaaggtcacctcactcagcaccactcaagaccaaatggaaacagaggaccagcacactcccgagacggcactgagagagcgcagccgccttcacagcagtctggatgcgggcatggcagccctcggcgctccgggacgtggcacctcctcggctggctgtccacccgcccctgcccctgcccctgctactgccaacctcgctccaactccaacatccactctctcttgttcttactttcctgaaaatatcggggaggttttctcccccagacgcctgatattgaagtaaaaaatttaaaaagcccaacctcttcctcctgacaccccacttagcctttcttttctttctttctttctttctttttttttttaaatagcattttggcgctcgaagttgatctccccagcgagggccccagcgtgaagccagggcccgggaagcaaatgcgagcctgta

SEQ ID NO: 469 - DNA, 940 bp, Homo sapiens
ggccatctctgggcggcggcggcgggcggtgtctgcgcggtcggtgagacccgcgcgggtgagacgctggccctccttacagcctagaaaaaatgacagatctcgtagctgtttgggatgttgctttaagtgacggagtccacaagatcgaatttgaacatgggactacatcaggcaaacgagtagtatatgtagatggaaaggaagagataagaaaagagtggatgttcaaattagtgggcaaagaaacattctatgttggagctgcaaagacaaaagcgaccataaatatagacgctatcagtggttttgcttatgaatatactctggaaattaatgggaaaagtctcaagaagtatatggaggacagatcaaaaaccaccaatacttgggtattacacatggatggtgagaactttagaattgttttggaaaaagatgctatggacgtatggtgcaatggtaaaaaattggagacagcgggtgagtttgtagatgatgggactgaaactcacttcagtatcgggaaccatgactgttacataaaggctgtcagtagtgggaagcggaaagaagggattattcatactctcattgtggataatagagaaatcccagagattgcaagttaatgaattttcatcttaagaagtaaagatcaggactttttaattactgtggtaattaaatgtgttcagtatgtacttatcagtacatttagtctgcaatgttttaattttttaaaaagttacatgaaactaacattccaagggtcaggaaaaaaaccaattatgtatagtcataaaaattacaatttatgatgcaaataatgtaaaatgttttaaagacaaatggcaaataagatatggaccaaagtcactaatgttttacaacagtaacctttactataataaatacttttaaaaaaaaaaaaaaaaaa

SEQ ID NO: 470 - DNA, 2416 bp, Homo sapiens
ggcctgaggagcgcggaccccggcgctcggctcccggcgccatgtgagggggctcgggggccgcggggggccgggcgctccccgccggagatgaggaaactgaggctcagagaggtcacatggcttgctcgaggccccccagccagtgtgaacccacatccctgcccccagggccacctgcaggacgccgacacctacccctcagcagacgccggagagaaatgagtagcaacaaagagcagcggtcagcagtgttcgtgatcctctttgccctcatcaccatcctcatcctctacagctccaacagtgccaatgaggtcttccattacggctccctgcggggccgtagccgccgacctgtcaacctcaagaagtggagcatcactgacggctatgtccccattctcggcaacaagacactgccctctcggtgccaccagtgtgtgattgtcagcagctccagccacctgctgggcaccaagctgggccctgagatcgagcgggctgagtgtacaatccgcatgaatgatgcacccaccactggctactcagctgatgtgggcaacaagaccacctaccgcgtcgtggcccattccagtgtgttccgcgtgctgaggaggccccaggagtttgtcaaccggacccctgaaaccgtgttcatcttctgggggcccccgagcaagatgcagaagccccagggcagcctcgtgcgtgtgatccagcgagcgggcctggtgttccccaacatggaagcatatgccgtctctcccggccgcatgcggcaatttgacgacctcttccggggtgagacgggcaaggacagggagaagtctcattcgtggttgagcacaggctggtttaccatggtgatcgcggtggagttgtgtgaccacgtgcatgtctatggcatggtcccccccaactactgcagccagcggccccgcctccagcgcatgccctaccactactacgagcccaaggggccggacgaatgtgtcacctacatccagaatgagcacagtcgcaagggcaaccaccaccgcttcatcaccgagaaaagggtcttctcatcgtgggcccagctgtatggcatcaccttctcccacccctcctggacctaggccacccagcctgtgggacctcaggagggtcagaggagaagcagcctccgcccagccgctaggccagggaccatcttctggccaatcaaggcttgctggagtgtctcccagccaatcagggccttgaggaggatgtatcctccagccaatcagggcctggggaatctgttggcgaatcagggatttgggagtctatgtggttaatcaggggtgtctttcttgtgcagtcagggtctgcgcacagtcaatcagggtagagggggtatttctgagtcaatctgaggctaaggacatgtcctttcccatgaggccttggttcagagccccaggaatggaccccccaatcactccccactctgctgggataatggggtcctgtcccaaggagctgggaacttggtgttgccccctcaatttccagcaccagaaagagagattgtgtgggggtagaagctgtctggaggcccggccagagaatttgtggggttgtggaggttgtgggggcggtggggaggtcccagaggtgggaggctggcatccaggtcttggctctgccctgagaccttggacaaacccttccccctctctgggcacccttctgcccacaccagtttccagtgcggagtctgagaccctttccacctcccctacaagtgccctcgggtctgtcctccccgtctggaccctcccagccactatcccttgctggaaggctcagctctttggggggtctggggtgacctccccacctcctggaaaactttagggtatttttgcgcaaactccttcagggttgggggactctgaaggaaacgggacaaaaccttaagctgttttcttagcccctcagccagctgccattagcttggctcttaaagggccaggcctccttttctgccctctagcagggaggttttccaactgttggaggcgcctttggggctgcccctttgtctggagtcactgggggcttccgagggtctccctcgaccctctgtcgtcctgggatggctgtcgggagctgtatcacctgggttctgtcccctggctctgtatcaggcactttattaaagctgggcctcagtggggtgtgtttgtctcctgctcttctggagcctggaaggaaagggcttcaggaggaggctgtgaggctggagggaccagatggaggaggccagcagctagccattgcacactggggtgatgggtgggggcggtgactgccccagacttggttttgtaatgatttgtacaggaataaacacacctacgctccgaaaaaaaaaaaaaaaaaa

SEQ ID NO: 471 - DNA, 1554 bp, Homo sapiens
gcgcgcctcgccggcgcctccatcccggatccttgctgcagcgtcagcgccgccgcccgtgcctttcctcttcctcctcctcctccttggcatccgcctcttcttcctcctgcgtcctcccccgctgcctccgctgctcccgacgcggagcccggagcccgcgccgagcccctggcctcgcggtgccatgctgccccggcggcggcgctgaaggatggcgacgccgctgcctccgccctccccgcggcacctgcggctgctgcggctgctgctctccggcctcgtcctcggcgccgccctgcgtggagccgccgccggccacccggatgtagccgcctgtcccgggagcctggactgtgccctgaagaggcgggcaaggtgtcctcctggtgcacatgcctgtgggccctgccttcagcccttccaggaggaccagcaagggctctgtgtgcccaggatgcgccggcctccaggcgggggccggccccagcccagactggaagatgagattgacttcctggcccaggagcttgcccggaaggagtctggacactcaactccgcccctacccaaggaccgacagcggctcccggagcctgccaccctgggcttctcggcacgggggcaggggctggagctgggcctcccctccactccaggaacccccacgcccacgccccacacctccatgggctcccctgtgtcatccgacccggtgcacatgtcgcccctggagccccggggagggcaaggcgacggcctcgcccttgtgctgatcctggcgttctgtgtggccggtgcagccgccctctccgtagcctccctctgctggtgcaggctgcatcgtgagatccgcctgactcagaaggccgactacgccactgcgaaggcccctggctcacctgcagctccccggatctcgcctggggaccaacggctggcacagagcgcggagatgtaccactaccagcaccaacggcaacagatgctgtgcctggagcggcataaagagccacccaaggagctggacacggcctcctcggatgaggagaatgaggacggagacttcacggtgtacgagtgcccgggcctggccccgaccggggaaatggaggtgcgcaaccctctgttcgaccacgccgcactgtccgcgcccctgccggcccccagctcaccgcctgcactgccatgacctggaggcagacagacgcccacctgctccccgacctcgaggcccccggggaggggcagggcctggagcttcccactaaaaacatgttttgatgctgtgtgcttttggctgggcctcgggctccaggccctgggaccccttgccagggagacccccgaacctttgtgccaggacacctcctggtcccctgcacctctcctgttcggtttagacccccaaactggagggggcatggagaaccgtagagcgcaggaacgggtgggtaattctagagacaaaagccaattaaagtccatttcagaaaaaaaaaaaaaaaaaaaaaaaaaaaaaaaaaaaaaaaaaaaaaaaaaaaaaaaaaaaaa

SEQ ID NO: 472 - DNA, 1055 bp, Homo sapiens
agtgcggacattgtcagctgcgtttccgcggtcgcggttgaggagctcaagcttgggaaaatggtgtgcattccttgtatcgtcattccagttctgctctggatctacaaaaaattcctggagccatatatataccctctggtttcccccttcgttagtcgtatatggcctaagaaagcaatacaagaatccaatgatacaaacaaaggcaaagtaaactttaagggtgcagacatgaatggattaccaacaaaaggaccaacagaaatctgtgataaaaagaaagactaaagaaattttcctaaaggaccccatcatttaaaaaatggacctgataatatgaagcatcttccttgtaattgtctctgacctttttatctgagaccggaattcaggataggagtctagatatttacctgatactaatcaggaaatatatgatatccgtatttaaaatgtagttagttatatttaatgacctcattcctaagttcctttttcgttaatgtagctttcatttctgttattgctgtttgaataatatgattaaatagaaggtttgtgccagtagacattatgttactaaatcagcactttaaaatctttggttctctaattcatatgaatttgctgtttgctctaatttctttgggctcttctaatttgagtggagtacaattttgttgtgaaacagtccagtgaaactgtgcagggaaatgaaggtagaattttgggaggtaataatgatgtgaaacataaagatttaataattactgtccaacacagtggagcagcttgtccacaaatatagtaattactatttattgctctaaggaagattaaaaaaagatagggaaaagggggaaacttctttgaaaaatgaaacatctgttacattaatgtctaattataaaattttaatccttactgcatttcttctgttcctacaaatgtattaaacattcagtttaactggtaaaaaaaaaaaaaaaaaaaaaaaaaaaaaaaaaaaaaaaaaaaaaaaaaaaaccaaaaaaaaaaaaaaaaaaaaaaaa

SEQ ID NO: 473 - DNA, 1960 bp, Homo sapiens
gcttcagtgtcgccgccatctttgttgatgtgtcagctccgcaggggtttggggaaacggccgctgagtgaggcgtcggctgtgtttctcaccgcggtcttttcctcccactcttggctggttggaccccgctatggaaaagttggcccctgagccagagctccagcagccttgttagggcgtggcctgaggcttggataagtgggatgtaaaacgaagatcaggagcagatttgaagaattacaaagtgaattggtgccagtcagcatgtcagagacagaccacatagcctctacttcctctgataaaaatgttgggaaaacacctgaattaaaggaagactcatgcaacttgttttctggcaatgaaagcagcaaattagaaaacgagtccaaactattgtcattaaacactgataaaactttatgtcaacctaatgagcataataatcgaattgaagcccaggaaaattatattccagatcatggtggaggtgaggattcttgtgccaaaacagacacaggctcagaaaattctgaacaaatagctaattttcctagtggaaattttgctaaacatatttcaaaaacaaatgaaacagaacagaaagtaacacaaatattggtggaattaaggtcatctacatttccagaatcagctaatgaaaagacttattcagaaagcccctatgatacagactgcaccaagaaatttatttcaaaaataaagagcgtttcagcatcagaggatttgttggaagaaatagaatctgagctcttatctacggagtttgcagaacatcgagtaccaaatggaatgaataagggagaacatgcattagttctgtttgaaaagtgtgtgcaagataaatatttgcagcaggaacatatcataaaaaagtaagttttttatacctttaggttattttttttccctcacaggcacagggattcgagataaaattctttaaaggaaaataccattttgttcatttttacttgcacattagaatcatgcacatagtagttgaacaataaatgtatagttgctgaatgtgtgagcaaatgtcgagtttttcagatatctgagttcaatatgttaaatagtgtaaatgtattaacgtgctagaaatttttatagacaactcaaaatttttcacttttgaaagaatgtagaagtatattgtcaaaactaagagaaactcaaaaggaaataacaagtcataaaattccacaactttttcttaaaatctgcattctaaattcattggtttaaaacattaaaatttagagaacagaataattgattatcgttcagtaaataataatacagttttggatatgtgaagttctgttttcatgatagtttaaaatttaccatcttaaccatttttatgtgtacgtttcagtagtgttattatatattcacactgttggacaaccaatctgcagaactttttcactttgcaaatctgaaacactgtattcgttaaacaacactatttccacttgccctcagtccctggcaaccaccattctactttctgttgctgagtttgactactcatgatacctcatgtaggtgaaatcatatacttttcatttcatgactggcttatttcatttagcctaatgtcctcatttatccatgttgtaacatgtcagaatttcatttctttttaaggctcaataatattgcattgtatgtatataccacattttgtttattcatccattaatggacatctgggttccttctgctttttggctgttgttaataatgctactgtgaacttgggtttgcaagtatctcttcaagactccaaggcccttcttgatattacccccaaacaaatgcctgctgttgctattcatatccttactgtaatactatattatgtgaataaactgtatgcttttgtacttgaaaaaaaaaaaaaaaaaaaaaaaaaaaaaaaaaa

SEQ ID NO: 474 - DNA, 3309 bp, Homo sapiens
ggcggagagaataaagcagaaagacaggaagaggaggtggagttctacagttagtgtggttttagtttttcctaagaagtggcgtggtttggggctttatatccgggaggagcatatgtacgcaaatcctggggcgtttgcaaacccggatccggggcgtctggccccatgcccggccgggcgtttgagggctactgccacgcagcgtttctggagcctgccggctggtgccctggtggcctttatctctgtccccctttgtcctctttatctcaggctctccaggaggccggggggcccactccgcctatcgctcccctcggctacgctgccacttcaatgccccgcaggtcgcgagctgctgttctttcgaaggcgtcggagaaccaggggcgtcccgcgccacctctgactcggagcagcgccgagcactgacgctcccgcccttgggcaaggacgccagtgcgcccgcgcgcgtccctctgcgcggcagcccgtcgcgggccctcaaggggaagcccaggccaggatggccccgggtcgcgcggtggccgggctcctgttgctggcggccgccggcctcggaggagtggcggaggggccagggctagccttcagcgaggatgtgctgagcgtgttcggcgcgaatctgagcctgtcggcggcgcagctccagcacttgctggagcagatgggagccgcctcccgcgtgggcgtcccggagcctggccagctgcacttcaaccagtgtttaactgctgaagagatcttttcccttcatggcttttcaaatgctacccaaataaccagctccaaattctctgtcatctgtccagcagtcttacagcaattgaactttcacccatgtgaggatcggcccaagcacaaaacaagaccaagtcattcagaagtttggggatatggattcctgtcagtgacgattattaatctggcatctctcctcggattgattttgactccactgataaagaaatcttatttcccaaagattttgaccttttttgtggggctggctattgggactcttttttcaaatgcaattttccaacttattccagaggcatttggatttgatcccaaagtcgacagttatgttgagaaggcagttgctgtgtttggtggattttacctacttttcttttttgaaagaatgctaaagatgttattaaagacatatggtcagaatggtcatacccactttggaaatgataactttggtcctcaagaaaaaactcatcaacctaaagcattacctgccatcaatggtgtgacatgctatgcaaatcctgctgtcacagaagctaatggacatatccattttgataatgtcagtgtggtatctctacaggatggaaaaaaagagccaagttcatgtacctgtttgaaggggcccaaactgtcagaaatagggacgattgcctggatgataacgctctgcgatgccctccacaatttcatcgatggcctggcgattggggcttcctgcaccttgtctctccttcagggactcagtacttccatagcaatcctatgtgaggagtttccccacgagttaggagactttgtgatcctactcaatgcagggatgagcactcgacaagccttgctattcaacttcctttctgcatgttcctgctatgttgggctagcttttggcattttggtgggcaacaatttcgctccaaatattatatttgcacttgctggaggcatgttcctctatatttctctggcagatatgtttccagagatgaatgatatgctgagagaaaaggtaactggaagaaaaaccgatttcaccttcttcatgattcagaatgctggaatgttaactggattcacagccattctactcattaccttgtatgcaggagaaatcgaattggagtaatagaaaatggaagatggtgttgttaataaaggcatttaatagataaaaacatctccaaaaaggattttgaagctgatcctatttagttaaaaagataattttgctttcaactgtaggtccagaaaactaattattggcatcagtctgtgaaatagtccattatttgttgttaaaaatgcttcaaaaggttttcagtgtcagtctgagatgcctggtatataggagcctttgggaaatacctatttttcagtattccatgcatattagatatcaccatgaagcaagagacatgcattctataatcatgtagacactcagactcaggggaaaatacaagttatatcctgaaagcctttaaaactctatggtaggatcaaagattcaaatggtttcagagaggttttatttcaattaatttgttctagtgctttcaagagcaagtacatcaaaatgtagaaggtaaaatgtatgcaacactaatataaattattccaagtctttaaggagccaaagaaaaaaaagatttctcacagctttttgttctgttttgtatttcaattaggaacttgcagtattattttgaaaaccattctaaaataataggagttaggaaataaataaagttttgctagccctgctaagttcaggcttagaggcttatcgctaagtataaacttcaccagattccacgaaaagctggatagctttttttctgacttatgttgtggttgcacccctcacaaatggcagaacagtatgtaaagctggtaacacctcggtttcagtgcaccatgtgtttgctttgtgaaggtgaagaatatgttggtttagagaaagaaattggatgtaattttatgcaatttacttttaaagacaaacataactatttagcagagaatattttaataaatgcaaaacaacagctggactgctgtacatcaaggacagattaactggaaaacatatgttccttatgtgtgatcgagagccattcagaaaagacttcctttgtgttcagcctatacttttccatatggtataccttgaaaaaaattagcacaccatggttatttttctaccttttataaaagacagagcctgtttactcatttagaagatagagaaaattggtctaaaattgaacatcctagattcacactcccaagtcacttaaggtgatttgatggtgaggaaaatgattgacaaagcccaacaatgatctcaggaattacattttccaacagaccaaaaaatgttttcatgtagcagcaatgcagatttggtgaatatttaatatatattttagtatgtatttcactttatgactgacaattaaaaaatattgtttggccaaatagtaaacacccttttgaaaccatgaaaaaaaaaaaaaaaaa

SEQ ID NO: 475 - DNA, 2728 bp, Homo sapiens
gcaattgcaagagcaaagattcttccttttcccttttttcctgggggggtggggggtggggtggggggagggagcgcccccagacattccaggacatcaccccctgccccaagcacgcaataaacactgacaagaaaaagtttttatttcctggttcaacttttttttttttccctggaatatagactgaagaatgggaataaacacgaataaataacaaagcgaggccgcgcacgccgggatgcgcctggctgcagccggcgaggctattgtctccccgccctgaagccagccccggcgtctttctccagctcgtttcctttcccggccttttttttttttttttttttttaattttcttttttaaaaagacgccccctccagccccctcgccggtgaccttggccgcctcggatgctctgattccacgcggctcgctctaacttgcccccgcgccggccgggcccatggccgcgtcggaggacgggagcggctgcctcgtgtcgcggggccgctcgcagagtgaccccagcgtcctcaccgactcctcggccacctcctccgcggacgccggggagaacccagatgagatggaccaaacgcccccggcgcgtcctgaatatctggtctcagggattcgaactccccctgtgaggaggaacagcaaactggccaccctgggcaggatcttcaaaccctggaaatggaggaaaaagaaaaacgaaaaactgaagcagacaacgtcagcgctggagaagaagatggccggcaggcaaggccgagaggagctcatcaagaaggggctgctggagatgatggagcaggatgctgaaagcaaaacttgcaaccccgatggaggaccccgatctgtacagagtgaaccacccactcccaagtcggagacgctgacttcagaagatgcccagcccggaagccccttggccactgggacggaccaggtctccctggacaagccactgtcctcagctgcccacttggacgatgcagccaagatgccttctgcatccagtggtgaagaagcagacgctggcagcctcctgcccaccaccaatgagctctcccaagccttagctggggctgactccctggacagtcctcccagacctctggagagatccgtgggccagctccccagccccccactgctgcccactccgccacccaaggcaagctccaaaaccacaaaaaatgtcacaggccaagccacactcttccaagcctccagcatgaagagtgccgacccttccctccggggccagctctccacacccacggggtctccgcatctcaccacggtccaccggcctcttcccccaagccgcgtcattgaggagctgcacagggcgctggccacgaagcaccgccaggacagttttcaaggaagagaaagtaaagggtctccaaagaagcggctggatgtccgtctgtcgagaacgtccagcgtggagcggggcaaggagagggaggaggcttggagctttgacggggcattggagaacaagcgaactgccgctaaggaatctgaggagaacaaggagaacctgatcataaattctgaactcaaagacgacttgcttttgtatcaggacgaggaggcgctgaacgactccattatttctggaacactgccacggaaatgcaagaaggagctcctggccgtgaagctaaggaaccggccaagcaaacaggaactagaagaccggaacattttccccagaaggactgatgaagaaagacaggagatccggcagcagatcgagatgaagctttccaaacggctgagccaaagacctgccgtggaagagctggagagaagaaatatcttgaaacaaaggaatgatcagacagagcaggaagaaagaagagaaatcaagcaaagattgacaagaaagcttaatcagagacccactgttgatgaattaagagacagaaaaattctgatacgattcagtgattacgtggaagtagcaaaagcgcaggactatgacaggagggcagacaaaccctggacgagactgtcagcagcagataaggcagcaattcgtaaagaattaaatgagtacaaaagtaatgaaatggaggtacatgcatcaagcaagcacttgacaagattccacaggccatagagattttcttctgagaagaatttgtgtttaattttttgataccaacactgaacattcatcagggaactttcctgaagttcagctcaagactaccctacctgctgtgtttgtgagaagagtaggatcacacacacaggtgcaatcttgaccacacttacctgcaagaggagtaaccagaggacacacttccttccttctttggtgtctgaggagtgtgaactgttggggtcagttaagacccaacataactctatcagaagaaaactgttgtttgcctttcaaccttgttttacagttctgcagtgtaatggaggacgggcaacgtgcatgtgcaggctcaccactcccaggcctctgacatgagggacatgtgacagtgtcattcagtattatgttcaaaagacatttttatcctgatcataattaatttgaaaactctttaagttcatgttatacaagatgatttactgtattatacttttccttttttatataatgtctaacaaaaaatacagctgcaacattttgattcctgttaattttgttctttaattaaatgactacttattgcaggaaattaa

SEQ ID NO: 476 - DNA, 1224 bp, Homo sapiens; identical to SEQ ID NO: 285

SEQ ID NO: 477 - DNA, 3049 bp, Homo sapiens
agccccggcgcctataaatcgcattccctcccgcgcccccctttttagcatatttgatcactttgattctctgttcttttctctccgcggtgtgtgtgtgcgtgcgcgcgtgtgtgttttcttcttctcctcctcctctccccgagttgcctcctttctccgggtgccgtactgccttttttcccctctttcattctttctctccgtctttttctcccccctctgcgcacgaaggatgtgcttctaggtggtgatctgccctcctctctctcttttatcatttctcccccgccgccggcgagttgactctttccctatgtgtgtgaggcggcggcggcagcagcagcagcagcggctccggcggcggcagcagcggcagcagcgacttcagcggcggcggcggcgctagacgcagcggctccgggcccgacccggcggcttcggggcgccctcccgcgccctcttgcaccctcgcacacacaaaaggcggcgcgccggagcccgagacccggggagccgccgccgccccgccgccgcccgcagccaggggagcaggaagtccggacgcagcccccatagatatggcaatggtagtcagcacgtggcgcgacccccaggacgaggtgcccggctcacagggcagccaggcctcgcaggcgccgcccgtgcccggcccgccgcccggcgccccgcacacgccacagacgcccggccaagggggcccagccagcacgccagcccagacggcggccggtggccagggcggccctggcggcccgggtagcgacaagcagcagcagcagcaacacatcgagtgcgtggtgtgcggagacaagtcgagcggcaagcactacggccagttcacgtgcgagggctgcaagagcttcttcaagcgcagcgtgcggaggaacctgagctacacgtgccgcgccaaccggaactgtcccatcgaccagcaccatcgcaaccagtgccagtactgccgcctcaaaaagtgcctcaaagtgggcatgagacgggaagcggtgcagaggggcaggatgccgccgacccagccgacccacgggcagttcgcgctgaccaacggggatcccctcaactgccactcgtacctgtccggatatatttccctgctgttgcgcgcggagccctatcccacgtcgcgcttcggcagccaatgcatgcagcccaacaacatcatgggtatcgagaacatttgcgaactggccgcgaggatgctcttcagcgccgtcgagtgggcccggaacatccccttcttccccgacctgcagatcacggaccaggtggccctgcttcgcctcacctggagcgagctgtttgtgttgaatgcggcgcagtgctccatgcccctccacgtcgccccgctcctggccgccgccggcctgcatgcttcgcccatgtccgccgaccgggtggtcgcctttatggaccacatacggatcttccaagagcaagtggagaagctcaaggcgctgcacgttgactcagccgagtacagctgcctcaaggccatagtcctgttcacctcagatgcctgtggtctctctgatgtagcccatgtggaaagcttgcaggaaaagtctcagtgtgctttggaagaatacgttaggagccagtaccccaaccagccgacgagattcggaaagcttttgcttcgcctcccttccctccgcaccgtctcctcctcagtcatagagcaattgtttttcgtccgtttggtaggtaaaacccccatcgaaaccctcatccgggatatgttactgtccggcagcagttttaactggccgtatatggcaattcaataaataaataaaataagaagggggagtgaaacagagaaagaaaaggcaaaagactggtttgtttgcttaatttccttctgttaagaaaggatataaaaggatgttacaagtttgctaaaagaagagaggggaagaatttaatggactgtgaatttcaaaaaaaaaaaaaagactgtcaaatgaacttttacagaatgcattaaaaaaaaaaaaactcctgtgtcggtcagaacaacttgctacttatcatttttgtataaaaaggaaattagtctttttctttttttggtaaatttttgaaaaatattgctaaaagtgcatttaaggagattgggagacaattagcagaatggagaaagtaagtcttttttttttccaaattattaattgtcctgtgtctatgtacctctagctgttcttttttgtacttttctggttccaaaccagtttattctgtggttctataataagttttgatataatcttggcttcttaaaaactgtgtatcattaaaatatatgttctgcaagaattaaaactgagtccatgaaaataccataggaagacataaaactttaaaaggcaactcaaagatgatggaaacgcacttacaagtggtgaccaaaatttttaggtgaagtcgagcactctaattagagaactggaggaaccacatataacacttaacttcccctaccctgcccctccccaaaagaaaccatgacaaacctagcttttaaaaaatattttaagaaagagaatgaactgtggaatttattggcagccaaggaatgtgtccaagacacatgctgaggttttgaataaaaagtgaacttttgtaatttgaattgggtcccgcttagttcttgaattgttatgaaaatcctatatctgtttgtatatttgcaaaccctttgtattataattgttgatattttccctttttaaaaaataccattgaaatcagcatgacaaaaataacactgttggcacttataggtaacgtgattgattcagtatcttagagtttacagtttgtgttttaaaaaaactgaaggtttttcttttaagtgcaacatttctgtatactgtaaaagttataataactgaactgtttggtcgagtctttgtgtgttatattccaaggaaaattgaaagtattcagaaattaaaatattatttgatatctgaaaaaaaaaaaaaaaaaaaaaaaaaaaaaaaaaaaa

SEQ ID NO: 478 - DNA, 4479 bp, Homo sapiens
gggattctgtgtaaacttggccgcggttgccgcaggaaggctagccagagggtaattacacaggtgaggcccggcggggcgggcggagggctcgggaggcgcaggggactggaagagttggctgcgcccaggcaccaggtggaagaatttccataccagccctgcggaggtgcctctgtttccagaggcgtttttgtacgaagggcattttgaaagcgaagcagaagccgtagaatcagcggcgagcctgttgaaagaacccacaggtgcatttcacagcactctgggcgaaaattggatgtgaaaatgaagccagaccgagatactctggatgaatattttgaatatgatgcagaggagttcttggtctctttggccttgctgataacagaaggacgaacacctgaatgttctgtaaaaggtcgaacagaaagctttcattgccctccagcacagtcttgttacccagtaactaccaaacatgaatgtagtgacaagctggcccagtgccgccaagccagacgaactaggtctgaggtcacattgttgtggaagaataaccttccaatcatggtggaaatgatgctactaccagactgctgctacagcgatgatgggcccaccacagagggaattgatctaaatgatcctgcgattaagcaagatgcattattattagaaagatggatcttggagccagttcctcgacagaatggtgaccgatttattgaagagaagacgcttctgttggctgtccgctcatttgtgtttttttctcagttaagtgcatggctgagtgtttctcatggtgctattccacgaaatattctctacagaatcagtgctgctgatgtagacctacagtggaatttttcacagactccaattgagcatgtgtttcctgttcccaatgtttctcacaatgttgccttgaaagtcagtgttcagtccttgcccagacaatctaattatccagttttgacgtgcagtattcacactaatattggcctttatgagaaaagaattcaacaacataaacttaaaactcatcagcaccataacccaaatgaagcagaacaatgtggtacaaacagttcacagcgtctgtgtagcaaacagacttggaccatggcacctgaaagtgtgttacatgcaaaaagtggcccaagtccagaatatactgcagctgtcaaaaatatcaaactatatccaggcactggcagtaaatctgaccatgggacatctcaagccaatattctaggctttagtggtataggtgatataaaatcacaagaaacatcagtgagaactttaaaatcattttcaatggttgattccagtatctctaaccgccagagtttctggcagtcagctggtgagactaaccctttaataggctctttaattcaggagcggcaagaaatcattgcaagaattgctcaacatttgattcattgtgatccaagcacttcacatgtttctggacgtccatttaatactcaagagtctagttcactccattcaaaacttttccgggtttcacaagaaaatgagaacgtgggaaaaggtaaagaagctttctccatgacttttggtagtccagagtttagttccccagaagacaccaatgaggggaaaattcgactaaaaccagaaactcctcgaagtgaaacttgtatttctaatgacttttattctcatatgcctgttggagagactaatcctttgataggctctttactccaggagcggcaagatgttattgcaaggattgctcagcacttggagcacattgatccaacagcatcacatatcccccggcagtcattcaacatgcatgactccagttcggttgcatctaaagtgtttaggagttcatatgaagacaaaaatttgttgaagaaaaataaggatgagtcctcagtttccatttctcacacaaaatgttccttgttaggagacatcagtgatgggaaaaacttaatacctaataaatgttttacttcttttaaaaataatagtaaagaaaagtgttctttgaaacatcaaacaagaaatcagtgtcagaacaatcctagtgaaatcatccaaagtacgtatcaggagacacagaacaaaagttctagtttatcaacttcctcaattttgtctcagcacaaagaaaataacttagatttgacaagcagattcaaggagcaagaaatgagcaatggaattgataaacagtattcaaattgcaccactattgacaaacagatttgtacaaataagtataaggaaaaaataataaatgagaactataatccaaaattctttggcaatcttcagtctgatgattccaaaaaaaatgactcaaaaataaaagttactgtgttggaaatgtctgaatatttgaacaaatatgaaagcatgtcctcaaataaagactcaaaaaggcctaagacatgtgagcaaaatactcaacttaatagcatagagaattatctcaataaagataatgaaggtttcaaatgtaaaaagtcagaccaattaaaaaatgaacaagataagcaagaagatccaactaatgaaaaatcgcaaaactattctcagagaagaagtataaaagactgtttgtctacatgtgagcaaccaaaaaatacagaggtattgaggactacactgaaacattcaaatgtgtggcgaaaacataattttcattccttggatggaacttcaaccagagcctttcatcctcaaactggattgcctcttctttcaagccctgttcctcaaagaaaaacacaatcaggttgctttgatctggattcttcattactacatctgaaaagcttctcatctagaagtcctcgaccatgtttaaacattgaagatgatccagatattcatgaaaaaccatttttgagttctagtgctccacctataacaagtcttagtctcctaggaaattttgaggaatctgtcttgaactatcgtttcgatcctctcggcattgttgatggttttactgccgaggtaggggcaagtggtgctttctgccccacacatttgactcttccagttgaagtgtcattctacagtgtttcagatgacaatgctccctctccttatatgggtgtgattactttagagtcccttggtaaaaggggttatcgagtacctccttcaggaacaatacaagtggtatgtgttttatagcctacaattgcaataatcattctctcacatacatatagaacttagccctttctcctgctactgctgctgcaacaactttgaccttatttaatcctaataagactgtggtgaagatgtttgttgtgatatatgatttacgagatatgccagccaatcatcagacattcctacgacaaagaactttttctgtacctgttaaacaagaagtgaagagaagtgttaataaagagaacatccgacacacagaagaacggttattacgctacctcatacatctgaggttccagagttctaaatctggaaagatctacctccatagagacgtacggctcctgttctctagaaagtcaatggaggttgatagcggtgctgcatatgaactcaaatcttacactgaatcaccaacaaaccctcagttttcaccaagatgttgataaggagtgatgatttaaagtatttactcagtacacaagtttgcaagtaaaaattagcatagaatggagtgtaccaaattaacaatcaggagagtggattctctcctgttatcctggaccagtttttatgaaaggattcctgaaatgaaatccatatattccatgtagactggaaaaactcatgtcctaatcctttttgtactgttgaaaccacttcattggacatgttgcaatagcaaaacccccagttagattagtgtttacacattttctcagttatttaatatttaatgttttccttaatactcaagtgatgtttgtctctagtgttctaatgtagcacaaatcctatgtaaaatcatactatgtatttttgacattaatgttgaaatcaaatatatgcacaagtctttaattttgtgtaatgtgttaagtgctgttcatttaagttattgaaaatgagaataaaatgttgagcttctttaaaagtaacacactatgcaagcatgtgtactttttatatctctcatgtttagtttttataacaccatatccaggttgctatctcacatagtagtcctttaacatattgtattagcagtgcaatgtggactaagctgcttcactttccctttgcaagttcagatcatcatgcccattcatagccaggattccttatccccaaaacagttctatttttccttaatcactactatagagtctttacattaaattactgtcgtatgctagataattttctcaaattgttaaaagaatatgtactttggaaacaaattagtatttatattgtaaatatattcaaaaaaaactaaaaaaaaaaaaaaaa

SEQ ID NO: 479 - DNA, 1492 bp, Homo sapiens
cgggcgacagcagggccgcggtgcagtgtccgacccgagagttgcggcctgagtcaccggccccgccctccggagccggacgctgcgggaggcccgggagcggcagtggaaccgactcccagaactccggacgtgtgcggcgcagtgagtcgcagccatgttcctggttaactcgttcttgaagggcggcggcggcggcggcgggggaggcgggggcctgggtgggggcctgggaaatgtgcttggaggcctgatcagcggggccgggggcggcggcggcggcggcggcggcggcggcggtggtggaggcggcggtggcggtggaacggccatgcgcatcctaggcggagtcatcagcgccatcagcgaggcggctgcgcagtacaacccggagcccccgcccccacgcacacattactccaacattgaggccaacgagagtgaggaggtccggcagttccggagactctttgcccagctggctggagatgacatggaggtcagcgccacagaactcatgaacattctcaataaggttgtgacacgacaccctgatctgaagactgatggttttggcattgacacatgtcgcagcatggtggccgtgatggatagcgacaccacaggcaagctgggctttgaggaattcaagtacttgtggaacaacatcaaaaggtggcaggccatatacaaacagttcgacactgaccgatcagggaccatttgcagtagtgaactcccaggtgcctttgaggcagcagggttccacctgaatgagcatctctataacatgatcatccgacgctactcagatgaaagtgggaacatggattttgacaacttcatcagctgcttggtcaggctggacgccatgttccgtgccttcaaatctcttgacaaagatggcactggacaaatccaggtgaacatccaggagtggctgcagctgactatgtattcctgaactggagccccagacccgccccctcactgccttgctataggagtcacctggagcctcggtctctcccagggccgatcctgtctgcagtcacatctttgtggggcctgctgacccacaagcttttgttctctcagtacttgttacccagcttctcaacatccagggcccaatttgccctgcctggagttccccctggctctaggacactctaacaagctctgtccacgggtctccccattcccaccaggccctgcacacacccactccgtaacctctcccctgtacctgtgccaagcctagcacttgtgatgcctccatgccccgagggccctctctcagttctgggaggatgactccagtccctgcacgccctggcacacccttcacggttgctacccaggcggccaagctccagaccgtgccagacccaggtgccccagtgcctttgtctatattctgctcccagcctgccaggcccaggaggaaataaacatgccccagttgctgatctctaaaaaaaaaaaaaaa

SEQ ID NO: 480 - DNA, 1760 bp, Homo sapiens
ggagaacacaggcgccgaccgcctcatgacccagcgctgcaaggaccgcctgaactcgctggctatctcggtgatgaaccagtggcccggtgtgaagctgcgggtgaccgagggctgggacgaggacggccaccactcagaggagtccctgcattatgagggccgcgcggtggacatcaccacatcagaccgcgaccgcaataagtatggactgctggcgcgcttggcagtggaggccggctttgactgggtgtattacgagtcaaaggcccacgtgcattgctccgtcaagtccgagcactcggccgcagccaagacaggcggctgcttccctgccggagcccaggtacgcctggagagtggggcgcgtgtggccttgtcagccgtgaggccgggagaccgtgtgctggccatgggggaggatgggagccccaccttcagcgatgtgctcattttcctggaccgcgagcctcacaggctgagagccttccaggtcatcgagactcaggaccccccacgccgcctggcactcacacccgctcacctgctctttacggctgacaatcacacggagccggcagcccgcttccgggccacatttgccagccacgtgcagcctggccagtacgtgctggtggctggggtgccaggcctgcagcctgcccgcgtggcagctgtctctacacacgtggccctcggggcctacgccccgctcacaaagcatgggacactggtggtggaggatgtggtggcatcctgcttcgcggccgtggctgaccaccacctggctcagttggccttctggcccctgagactctttcacagcttggcatggggcagctggaccccgggggagggtgtgcattggtacccccagctgctctaccgcctggggcgtctcctgctagaagagggcagcttccacccactgggcatgtccggggcagggagctgaaaggactccaccgctgccctcctggaactgctgtactgggtccagaagcctctcagccaggagggagctggccctggaagggacctgagctgggggacactggctcctgccatctcctctgccatgaagatacaccattgagacttgactgggcaacaccagcgtcccccacccccgtcgtggtgtagtcatagagctgcaagctgagctggcgaggggatggttgttgacccctctctcctagagaccttgaggctggcacggcgactcccaactcagcctgctctcactacgagttttcatactctgcctcccccattggggagggcccattccatccatcttaggcccctttgggtgggcttgcgcctcagttgatgctgctaaattccctgggagccagcatggatctggctggacccgatgctgtccagaactgggaaggccacaggggtggggcagccatcccggccattctgaggtatgacattcctccccggccacactcctcaagacacatccagagactgttgctgtctgtgggcagagttctgtgttctggccaatgtgaccgtagtgccggggactgggggaggtgggttggatgtgcttgccacccccccggctaagctcccccttctgctgaaccatgatccccaccccctccgccggtcagtctcccataccttatttattggagtggagggggaagcccatgggagaattttggggatgttttggtcttttcttccttttgtaataaaaattatttaagttgttagaaaaaaaaaaaaaaaaaaaaaaa

SEQ ID NO: 481 - DNA, 1236 bp, Homo sapiens; identical to SEQ ID NO: 303

SEQ ID NO: 482 - DNA, 1114 bp, Homo sapiens
gctccgcgtcctgtgaggtccagtggccgcccaggcgcgaccagatctgggtgcgcggagagcgcgcatggcggctgtgggaccgcggaccggccccggaaccggcgccgaggctctagcgctggcggcagagctgcagggcgaggcgacgtgctccatctgcctagagctctttcgtgagccggtgtccgtcgagtgcggccacagcttctgccgcgcctgcatagggcgctgctgggagcgcccgggcgcggggtctgttggggccgccacccgcgcgccccccttcccactgccctgtccgcagtgccgcgagcccgcgcgccccagtcagctgcggcccaaccggcagctggcggcagtggccacgctcctgcggcgcttcagcctgcccgcggctgccccgggagagcacgggtctcaggcggccgcggcccgggcagcggctgcccgctgcgggcagcatggcgaacccttcaagctctactgccaggacgacggacgcgccatctgcgtggtgtgcgaccgcgcccgcgagcaccgcgagcacgccgtgctgccgctggacgaggcggtgcaggaggccaaggagctcttggagtccaggctgagggtcttgaagaaggaactggaggactgtgaggtgttccggtccacggaaaagaaggagagcaaggagctgctggtgagccaggcacccgcaggccccccgtgggacattacagaggcctgagaactcagcaccagggctcggtgtgtgtggtgttggagtgtgtgctatggaaccgcagaatcgatttcagaaagataatagagtccatattatatagggtgtccacataattgttgtacaaaccagagctttttaaagtgaaaagcagtgctaaaataattattgcaaaacaactggcttaaactggagctgtcccagcgaatcaggacgctcagtcactctgatattacgtaacataccagttagggcctgcggaagcatcttgtaatggaacacattactatttctgcagagaaacatggatattcaataagtgggaatattaatacaataaagagcctcatggcatgttttgtcaacaaaacagtagtgaaaaaaaaa

SEQ ID NO: 483 - DNA, 903 bp, Homo sapiens
gctccctcttgccccagcctcgcgagccgcctaactgccccgttccaagggtgccaccggaccccgctggagaggaacttctccgttggctgatttcatcaccacccattcccgattccacgtttcctttaagcggggctggcggacgcagagggcaaggaactggattgcgattggtcagcacgtgcctcggtcggcggtacaattggctgaggcgctgggccttgggaagcattccccgacggattggtcgtcgctctcgcagagcccgcctcccgcagtacaagcggcccccggttggggttgggaaggagggattccgggagaagaaacatggcggtggcggacctcgctctcattcctgatgtggacatcgactccgacggcgtcttcaagtatgtgctgatccgagtccactcggctccccgctccggggctccggctgcagagagcaaggagatcgtgcgcggctacaagtgggctgagtaccatgcggacatctacgacaaagtgtcgggcgacatgcagaagcaaggctgcgactgtgagtgtctgggcggcgggcgcatctcccaccagagtcaggacaagaagattcacgtgtacggctattccatggcctatggtcctgcccagcacgccatttcaactgagaaaatcaaagccaagtaccccgactacgaggtcacctgggctaacgacggctactgagcactcccagcccggggcctgctgcctccagcagccacttcagagcccccgcctttgcctgcactcctcttgcagggctggccctgcctgctcctgcggcagcctctggtgacgtgctgtccaccaggccttggagacaggctagcctggccacagaattaaacgtgttgccacacctgccggcttctgaaa

SEQ ID NO: 484 - DNA, 2688 bp, Homo sapiens
gtttgccgccagaacacaggtaagtgccgtgtgtggttcccgcgggcctggcctctttacgggttatggcccttgcgtgccttgaattacttccacgcccctggctgcagtacgtgattcttgatcccgagcttcgggttggaagtgggtgggagagttcgaggccttgcgcttaaggagccccttcgcctcgtgcttgagttgaggcctggcctgggcgctggggccgccgcgtgcgaatctggtggcaccttcgcgcctgtctcgctgctttcgataagtctctagccatttaaaatttttgatgacctgctgcgacgctttttttctggcaagatagtcttgtaaatgcgggccaagatctgcacactggtatttcggtttttggggccgcgggcggcgacggggcccgtgcgtcccagcgcacatgttcggcgaggcggggcctgcgagcgcggccaccgagaatcggacgggggtagtctcaagctggccggcctgctctggtgcctggcctcgcgccgccgtgtatcgccccgccctgggcggcaaggctggcccggtcggcaccagttgcgtgagcggaaagatggccgcttcccggccctgctgcagggagctcaaaatggaggacgcggcgctcgggagagcgggcgggtgagtcacccacacaaaggaaaagggcctttccgtcctcagccgtcgcttcatgtgactccacggagtaccgggcgccgtccaggcacctcgattagttctcgagcttttggagtacgtcgtctttaggttggggggaggggttttatgcgatggagtttccccacactgagtgggtggagactgaagttaggccagcttggcacttgatgtaattctccttggaatttgccctttttgagtttggatcttggttcattctcaagcctcagacagtggttcaaagtttttttcttccatttcaggtgtcgtgaaaactacccctaaaagccaaaatgggaaaggaaaagactcatatcaacattgtcgtcattggacacgtagattcgggcaagtccaccactactggccatctgatctataaatgcggtggcatcgacaaaagaaccattgaaaaatttgagaaggaggctgctgagatgggaaagggctccttcaagtatgcctgggtcttggataaactgaaagctgagcgtgaacgtggtatcaccattgatatctccttgtggaaatttgagaccagcaagtactatgtgactatcattgatgccccaggacacagagactttatcaaaaacatgattacagggacatctcaggctgactgtgctgtcctgattgttgctgctggtgttggtgaatttgaagctggtatctccaagaatgggcagacccgagagcatgcccttctggcttacacactgggtgtgaaacaactaattgtcggtgttaacaaaatggattccactgagccaccctacagccagaagagatatgaggaaattgttaaggaagtcagcacttacattaagaaaattggctacaaccccgacacagtagcatttgtgccaatttctggttggaatggtgacaacatgctggagccaagtgctaacatgccttggttcaagggatggaaagtcacccgtaaggatggcaatgccagtggaaccacgctgcttgaggctctggactgcatcctaccaccaactcgtccaactgacaagcccttgcgcctgcctctccaggatgtctacaaaattggtggtattggtactgttcctgttggccgagtggagactggtgttctcaaacccggtatggtggtcacctttgctccagtcaacgttacaacggaagtaaaatctgtcgaaatgcaccatgaagctttgagtgaagctcttcctggggacaatgtgggcttcaatgtcaagaatgtgtctgtcaaggatgttcgtcgtggcaacgttgctggtgacagcaaaaatgacccaccaatggaagcagctggcttcactgctcaggtgattatcctgaaccatccaggccaaataagcgccggctatgcccctgtattggattgccacacggctcacattgcatgcaagtttgctgagctgaaggaaaagattgatcgccgttctggtaaaaagctggaagatggccctaaattcttgaagtctggtgatgctgccattgttgatatggttcctggcaagcccatgtgtgttgagagcttctcagactatccacctttgggtcgctttgctgttcgtgatatgagacagacagttgcggtgggtgtcatcaaagcagtggacaagaaggctgctggagctggcaaggtcaccaagtctgcccagaaagctcagaaggctaaatgaatattatccctaatacctgccaccccactcttaatcagtggtggaagaacggtctcagaactgtttgtttcaattggccatttaagtttagtagtaaaagactggttaatgataacaatgcatcgtaaaaccttcagaaggaaaggagaatgttttgtggaccactttggttttcttttttgcgtgtggcagttttaagttattagtttttaaaatcagtactttttaatggaaacaacttgaccaaaaatttgtcacagaattttgagacccattaaaaaagttaaatgagaaaaaaaaaaaaaaa

SEQ ID NO: 485 - DNA, 6328 bp, Homo sapiens
cccagcctgccggccggtactcaccgctacccggagttcgctcagacggtgagatttggggcgggtccgaggcagcggcgggacgctacctgcgaccgggaccatgaggagctgccagacccgtggggccggtaacgagagcagtcgcggcacctgctgagaggaaagagggagcggtccggcgcggctggggcgcggcagaggcttgcccgatcctcggccatgtcactgctctgcgtgcgcgttaaaagggccaaattccagggttcaccagataaatttaacacatatgtgaccctgaaagtacagaatgtgaagagcacaactgtagcagttcgtggtgatcagccttcctgggaacaggatttcatgtttgagattagtcgcctggacctgggtctaagtgtggaggtatggaacaaaggactgatctgggacaccatggtggggactgtgtggattgcgctgaagactattcgtcagtcggatgaggaagggcctggggaatggtccacattagaggcagagacgttaatgaaagacgatgagatctgtggaactagaaacccaactcctcataaaattttgcttgatacaagatttgagttgccttttgatatcccagaggaggaagccagatattggacctacaaatgggagcaaatcaatgccttgggagctgacaatgagtattctagtcaagaagaaagccagaggaagccattgcccactgctgccgcccagtgttcttttgaagaccctgatagtgccgtcgatgaccgagatagtgactatcgcagtgagaccagcaacagcttcccacctccttaccatacagcttcccagcccaacgcttctgtgcaccagttccctgtgccggtgcgatcgccacagcagctgctacttcaaggcagttcccgggactcttgtaatgactctatgcaaagttatgaccttgattatccagagcggcgggctatcagccccaccagcagcagtaggtatggctcctcctgtaatgtgagtcaaggaagctctcagctaagtgaactagaccagtatcacgaacaagatgacgaccatcgggagacggactcgattcattcttgccacagctctcacagcctgtccagagatggccaagcaggttttggagaacaagagaaacccttggaggtgacaggtcaagcagagaaggaggcagcatgtgaacccaaggagatgaaagaagatgccacaacccaccctcccccagatctggtgctgcaaaaagaccacttcctaggtccccaggagagttttcctgaggagaatgcatcttcaccatttacccaagccagagcacattggatccgagcagttaccaaggttcgactccagctgcaggagattccagatgatggtgacccctctctgcctcagtggctcccggaagggccagccggagggctctatggcattgacagcatgccagatttacgcagaaagaagccactgccacttgtcagtgatctgtcactggtccagtctcggaaggcaggaatcacttctgcaatggctacacgcacttctcttaaggacgaagagctgaaatcccacgtgtataagaaaaccctgcaggccttaatctaccccatttcgtgcaccactcctcataactttgaggtctggacggccactaccccaacctactgctatgagtgtgaaggcctgctctggggcattgcccggcagggcatgcgctgcagcgaatgtggagtcaagtgccatgagaagtgccaggatctgctcaatgctgactgcctgcagcgggctgcagaaaagagctgtaaacatggagctgaggaccggacccagaacattatcatggccatgaaggaccgcatgaagatccgagagcgaaataagccagagatctttgaagttatccgggacgtcttcacagtgaacaaagctgcccatgtgcagcagatgaaaacagtgaagcagagtgtactggatggcacctccaaatggtcagccaagatcaccattactgtggtgtgtgcccagggcctacaagccaaggacaaaacaggatccagtgacccttacgtgactgtgcaagtcagcaaaactaagaagcgtaccaagaccatttttggaaacttgaatcctgtttgggaggagaagttccattttgagtgccacaactcctctgaccgcattaaggtgcgtgtatgggatgaggatgatgacatcaagtcaagagtaaagcaacgcctaaagcgagagtctgatgatttccttggccaaaccatcattgaggttcggaccctaagtggcgagatggacgtctggtacaacttggagaagaggacagacaaatcagccgtctcaggggctatccgactacaaatcagtgtggagatcaagggggaggagaaagtagccccataccacgtgcagtatacatgtctccatgagaatcttttccattacctcacagacattcagggcagtggaggagtccgcatccctgaagctcgaggagacgatgcctggaaggtgtactttgatgagacagcccaagaaattgtggatgaatttgccatgcgttatggcattgagtccatatatcaggccatgacgcactttgcatgtttatcatccaagtacatgtgtcctggtgtgccagcagtgatgagcaccttactggccaacatcaacgcctactatgcccacacaactgcctctaccaatgtctctgcatctgatcgctttgcagcctccaactttgggaaagagagatttgtaaaactgctggaccagctacacaactcactgaggatcgacctctctacatacaggaataatttccctgctgggagtcctgaacggcttcaggacttaaaatccacagtggatttgctgaccagcattactttcttcagaatgaaggtacaagaactgcaaagccctccaagagccagccaggtggtaaaggattgtgtgaaggcctgtttgaactccacatatgaatatatcttcaacaactgccacgacttatacagccgccagtaccagctgaagcaggagctacctccagaggaacaagggcccagcattcggaacctggatttctggcccaagctcatcacactcatcgtgtcaatcatagaggaagataagaattcctacacacctgttctgaaccagtttcctcaggagttgaatgtgggaaaagtcagcgcagaagtgatgtggcatttgtttgcccaagacatgaaatatgcattggaggagcatgagaaagaccacctgtgtaaaagtgctgactacatgaacctgcacttcaaggtgaagtggctccacaatgaatacgtgcgggatctgcctgtcctccaggggcaggtgcctgagtacccagcgtggtttgagcagttcgtgctacaatggctggatgagaatgaggatgtatccctggaattcctgcgtggggccctggaacgagataagaaggatggattccagcagacatcagagcatgcactcttttcctgctctgtggtggatgtcttcacacaactcaatcagagctttgagatcatccggaagctggaatgcccagaccccagcatccttgcccactacatgaggaggtttgctaagaccatcgggaaggtgctgatgcagtatgcagacatcttgtcaaaggacttcccagcctattgcacaaaggagaaactgccctgcatcctgatgaacaacgtgcagcaactgagggtccagctggagaaaatgtttgaggccatgggaggcaaggagctggaccttgaagctgcagacagtctgaaggagctgcaggtgaaactgaatacggttctggatgagctcagcatggtgtttggaaacagtttccaggtacggattgatgagtgtgttcgacaaatggccgacatcctgggccaggttcggggcacagggaatgcatctccagacgccagggcctcagcggctcaggatgcagatagcgtactccggcctctcatggacttcctggatggcaacctcaccctctttgccactgtgtgtgagaagacggttctgaagcgtgtactgaaggagctctggcgcgtggtgatgaacacaatggagaggatgattgttctgcccccactcactgaccagacgggcacccagctgatcttcactgctgccaaggagctgagccatctttccaaactcaaggatcacatggtacgagaggaaacacggaatctcactccaaagcagtgtgcagtccttgacctcgccctggacaccatcaagcaatacttccatgcaggaggcaatgggctgaagaaaaccttcctggagaagagcccagatctgcagtctctacgctatgccctgtctctgtacacacagactactgacactctcatcaagacctttgtgcgctcgcagaccacccaagggtctggtgtggacgatcctgtgggagaagtctctattcaggtggacttgtttacacaccctggtactggggagcacaaggtcacagtgaaagtggtggctgccaatgacctcaagtggcagacagcgggtatgttccggcctttcgtggaggtgactatggttggcccacaccaaagtgataagaagaggaagttcacaaccaaatccaaaagcaacaactgggcccccaagtacaatgagacattccacttactcctgggaaatgaggaggggcccgagtcctatgagttgcagatatgcgtgaaggattactgctttgcccgggaagatcgcgtgctagggctggctgtgatgcctctgagggatgtcacagccaagggcagctgtgcctgctggtgccccttgggccggaagatccatatggatgagacaggcctgaccattctccggattttatctcagaggagcaatgacgaggtggcccgagaatttgtgaaactcaaatcagagtctcgttccacggaggaggggagctgaacaccttcgactcctgtgccaatcaggcagcagcaatttcacaaatcagggccagtgggagttagctgtgtaaccggcttagggtctttgcagtcaagaggctgaccccttcagttaaagatatttaaggaaaaatttggggtggtgataatatggcttttcacagaaagggtcatgaagccctggcccaacaggactgtggtactaggggctgggatgtggggttaccacatggagagattttccattaagagagaaggacaaacatttctgagagtgtcagccattcttggtagacacctctccactcctcatcccacctctacccatctccatgccacaccttatccagttagacacatacataccaatcattagaagaacaagtttagaaggtgtggaacttgtgcctggctggctgggtagtcagctgagcctgttgctgagcccggtggtctggattggagtatggccagggcaggagtacacagaatagaatttagactgtcccttgagtagaatccactgattttctgtggctccagtgagaacaaggctttgaaactgaacaagataacttctagaaatgaactgtactaatccctttccccagattgtatcatgagtagaatcaggttcacgtggtgcttcaaagccctgagaagaatatttctttggaccccaggcactaggggccacctgcctgggagtctccctgcctcactcctctaggcaggggagtgatgcttcaggacgtgacaggctgttctaacatgtgtctacctgagggctagttgaaggatccaggagtattttcttcttgggtgggccctgaacaaagccaaaaattgtagaaaccagtctagaaaaagtcctgctcatctgtggccactgccttctagccgtcctccaccttgcagaaagaatctagcctttggtctctctctctctcatcggggtcatttgctattcccctctgatattcaaccctatagaaggagcctggactctgatccctctgtacaggctggatggaaggggccctccacacttcctgggaggtcagagacaaactgtttcagagagtcagatggacttcccaagacttgttgagagatgtgacatggttcttggatttcctctgtagcagcctcctggacttcctgaggactcgacattgtccacagatgtactggccattacatgaaacaagaaaccaagcatctttgctgttgttaattattatatgtgccattgttacaggagattataggctagtctgtaataaattatcttatagcaaaaaaaaaaaaaaaaaaaaaaaaaaaaa

SEQ ID NO: 486 - DNA, 2847 bp, Homo sapiens
acctttaagcgtcacgggtggggctgcagcttctggacctaggactttgaacatgtcgcgcctgaagcggatagcggggcaggatctccgcgctggtttcaaagcaggtggaagagactgcggtacctcggtaccccaagggctgttgaaggcagcgaggaagagcggccagttaaacctgtcgggtagaaacctcagtgaagtgccgcagtgtgtctggagaataaatgtggatatccctgaggaagctaatcagaatctttcgtttggtgctactgaaagatggtgggagcagacagatttgaccaaactaataatatcaaacaataaacttcagtcacttacagatgacctgcgactcttgcctgcactgactgttcttgatatacatgataatcagttgacatcccttccttctgctataagagagctagaaaatcttcagaaacttaatgtcagccataataaactgaaaatactccctgaagaaattacaaacctaagaaacctgaagtgcctgtatctccagcataatgaattaacctgcatatcagagggatttgaacaactttccaatttagaagatttagatctttcaaacaatcatcttacaactgttcctgctagtttttcttctctgtccagtctggtgcgactcaatctttctagtaatgaactgaagagtttgccagcagaaataaatagaatgaaaaggttgaagcatttggattgtaattcaaatctcttggaaactatacctcctgaattggctggcatggaatcactagaattgctttatttgcggaggaataaattacgttttctaccagaatttccttcttgtagtctattgaaggaattgcacgtaggtgaaaaccagattgaaatgttagaggcagaacatcttaaacatctgaattcaattcttgtgctagacctgagggataacaagttaaaatctgttccagatgaaattatactactacggtccttggaaaggcttgacctaagcaacaatgatattagtagtcttccctattcattggggaaccttcatttgaaatttttggcattagaaggaaatcctttgagaacaattcgaagagaaattataagtaaaggaacacaagaagtcctaaaatatctacgaagcaagatcaaagatgatggacctagccaaagtgagtctgctactgagactgccatgacactaccaagtgaatccagagtcaatatacatgccatcattacattaaaaatattagactatagtgataaacaagcaactttgattcctgatgaggtgtttgatgcagtaaaaagcaacatcgtcacttctattaacttcagtaagaatcaactatgtgaaattccaaaaaggatggtagaactgaaggaaatggtttctgatgtcgatctcagttttaataaactttcctttatatccttggagttatgtgtgcttcagaaattgacttttttagatctcaggaacaattttttaaattctttgccagaagaaatggaatcactggtaagactgcaaacgatcaatctttcctttaataggtttaaaatgctacctgaagttctatatcgtatcttcacacttgaaacaattctgattagtaataatcaggttggatctgtggaccctcagaaaatgaagatgatggaaaatctgaccacgttggaccttcaaaataatgacctcttacaaattccaccagagctcggtaattgtgtaaacttaagaacattactattggatggaaatccattccgagttcctcgagcagccatattaatgaaaggaacagctgctatacttgaatatttgagagaccgaattcctacttaacatggagttgctttataacccttgtcatgtattattaaccctggttaattctaaggaggatgtaacatttgttttagtatcatcttaaaaggtgattattgtaattgatcttgtagtttcccagtatcacctacccgttggtataattagcctgggccatattcactgccagtaaatatttttacatttttatttaagatttttgtaaggtgttgtgtacatttgtaatggtgataaccacaatgtgttcatacatttgttctaaatgttttgcttatgatttatcctgctaactttcattttcttatagcaagcagttttttcaaaaatgaatttttatttaatgtggttcagtattataataacaaagcatttttgtagaactggttttttttctcatttatttttgtattccatacaatgtgaccaattgacttgaatatgactagccagtttctatgtttttgttagatataaaattaaatcgaattttgttgaatactgttctttggcatttaaaaaataagaccttcttatcttgggccacatgtcaaaagaaaaaggaaacaaaaatatattaaaaataagacttttcattacccatgataggacttttgtgatatggctaatctcagtacacatttcaacttaaaacctttttatttacagcaccataattttaaaatttacttgcaatcttggtaagactaaacttgcagtgtttttctaaaagggaatttgataggtaaacttgatttaataaaaattaaatatcatttttgtttacaccaaaattatcagaagtaggttgattagtcattataacacttaccatatgattctattaagaagtcaattcagtagcatgtatatcaatttatatagataggtagatagcttttggatgattgaggcatgcttatattatgaaaaaaattgctaataaagataaatactacatgttcagaataaaagttacatttttc

SEQ ID NO: 487 - DNA, 5876 bp, Homo sapiens
caagggccccctgcgtggctaccgcagccgctggttcgtgttcgacgcgcgccgctgctacctttactatttcaagagtccgcaggacgcgctgcccctcggccacttggacatcgcggacgcctgcttcagctaccagggccccgacgaggcggcggagccgggcacggagccgcccgcgcacttccaggtgcacagcgcgggagccgtcacggtgctcaaggctcccaatcgtcaactcatgacttactggttacaggagcttcagcagaagagatgggaatattgtaacagtcttgacatggtcaagtgggacagcaggacctctccaactcccggggattttcctaagggtcttgtagccagagataacactgatttaatttacccacacccaaatgcttctgcagaaaaagccagaaatgtcctagctgtggagactgtgcctggagagctggtgggagaacaagctgcaaatcagcccgccccagggcatccaaattccattaatttttactctttgaaacagtggggcaatgagctcaagaattcgatgtcttctttccgtcctgggagaggacataatgatagtcggaggactgtgttttataccaatgaagagtgggaacttttagacccaacccctaaggacctagaggagtccatagtacaggaagaaaagaagaagctgacccctgaaggaaacaaaggagtaactggctcaggattcccctttgattttggacgtaacccctacaaaggaaagcgccctttgaaagacataattgggtcgtacaaaaatcgtcacagcagtggtgacccttcaagtgaaggcacatcaggcagtggcagcgtcagcatcaggaagccggcctccgaaatgcaactgcaggtccagagccagcaggaagagctggaacagttaaagaaagacctgtccagtcagaaggagcttgttcgactgctccagcagacagtccggtcatcccagtatgacaagtatttcacaagcagccggctctgtgagggggtcccaaaggacacgctcgagcttctgcaccaaaaggatgatcagattctgggccttaccagccagctggagaggttcagcttggagaaggagagtcttcagcaggaagtaaggacgctgaagagcaaagtgggcgagctcaacgagcagctgggaatgctcatggagaccatccaagccaaggacgaggtcatcatcaagctcagcgagggcgagggcaacgggcctcctcccaccgtggcgcccagctccccttcggttgtgcctgttgccagggaccagctggaactggacaggctgaaagataatctacaggggtacaaaacccaaaacaaatttctaaataaggagattttggaactctcagctctacgaagaaatgcagaaaggagagagagggatctgatggcaaagtattctagcctggaagccaagctctgccagatagaaagtaaatacctgatattgctccaagaaatgaagacaccagtgtgctcagaagaccaggggcccacccgggaggtcatagcccagttgctggaggatgctctgcaggttgagagccaagagcagccggagcaagcatttgttaaacctcatcttgtcagtgaatatgatatttatgggttcaggactgtacctgaggatgatgaggaagagaaattggttgccaaggtccgcgcgttggatctgaagactctctacctcacagaaaaccaggaagtctccactggggtcaagtgggaaaactattttgcaagtacagtgaacagggagatgatgtgctctccagagttaaaaaacctcatccgtgcgggcattccccacgagcaccgttccaaggtgtggaagtggtgtgtggaccgtcacaccaggaagttcaaggacaacactgagcctggccacttccagaccttgctgcagaaggcgctggagaaacagaacccagcctccaagcagattgagctggacttgctgcgaactctgcccaacaacaaacattactcctgccccacctcagaaggcatacagaagttacgcaatgtcctcctcgccttctcctggcggaatccagatatcggctactgtcaaggcctaaacaggttggtggcagtggccctcctgtacctggaacaagaagatgctttctggtgtctcgttaccatagtggaagttttcatgcctcgagactattatacaaagactcttttaggatcccaggtggaccagcgggtgttcagagaccttatgagtgagaagctgcctcggttgcatggccactttgaacagtacaaagtcgactacactctcatcactttcaactggtttctggtggtatttgtggatagtgtcgttagtgacatcctctttaaaatatgggactctttcctttatgaaggaccaaaggttattttccgttttgctctggcactttttaagtacaaggaagaggagattttgaaattgcaagattcgatgtctatatttaagtatctccgctacttcactcgcactatccttgatgctagatccggaaccgacgcgcctaccacttggagaaagtccggctggagctgaccgagctggaggccatccgtgaggacttcctgcgtgagcgggacaccagccctgacaagggtgagctggtcagtgacgaggaggaggatacctgagtgggctcgggatgctgctcttccttccttcacaaccaaagtgtgcccaaagggtgaaagtgcacttaaaagccagaatgtaacgtgtgtgtcctctggggatctgctgggcagatgtcccaagccaggctgcccttcctcatttcccactgtgcggggggcaggggtgggaggtctaatctgtttacaaccatttccgtgccatgcttttggttacacgtatctcagtcacgctttctgcctggttggtggatcctcaggcttaccagtggctatttgcaagagcctgtttccagcctccgtcagcctgtcggtgctctgaccctctgaaaccttgctttgctgggcatctccccatattctctctcctgtacatagtgggcagtggtgtgtggttttgaatggcagtgctataaaggatgccagctgtgctttaggcacctgtaggccagagggttgctgcctcaggcataaggttggtatgaaaaggggctgccttagaaaagcaggcacatcccttgttcagaaatggccactgtaggaaagcctgtgaacctcccaccagtggctttaagctgccagccatgccccatttctagaatagcctttgctcttccacacgcaacccttccatcagtgtcttccagcctgcatggggagggcctggctgcccagacacccaccctcacttctcatggccagcctgtgtttgcagatcactgggctgctctgtccccagcttgccccgtgccaggcatggctctgtgagattctgtggaatgcccttcttgacttgtggaaatcattcaccaagtacgatgggatgggattccaagtaaacagtggaccgtcatattgcaaagcaggcccacgcctgggctggccttggttgaggggatggaggaatgttttcgggggtgctttgcagggcagtggtgcagccgcagcgtgaacgctcttggacagctgaaaaccatggcctccttggggatggccagtgctcctggtgtctccacctgcctgggttgtgcaggaggccggctgccagtgcctggggctgggaaacttttttgcttggggcaggcttgggtgagctctcccagatgtgtgcccaccccaccactgcctggaacatccttgttctctgccaggatgcaggggcactgttgcctctgacacagcagtttctgggaactcagaggactgcctttctgaaggctggggagaggctttgagcaaggagcttgtttttgcttaatcgctctagaccatccctgatgcgtagatgtgagaggatgttttctggcacagtgttatgaaaatacaagataaatgatctcagtggaatgtttcatattacccgaaaaaaactggaaatcatcctttgttgtgaacacactgagactaagaattgaagcaatgcagttttaagaagtatttttcctattttttgctgtcaactttttggcaatgccacggcaaagttggtgtttcagcacatgctagagtgagctccggcttcgtgtctttaaccaactccactaatgtttcactgggtagacggagctggcctctatatttagccagaagcctttgcctcttttcaggcatcaaaaatgggttttgtcattgtctttgtctttgagagcagcagtttgaggtctgactccttcagttgtcctgtgagctgggcgttgcagtctgctcgaatcaagtgttggaaaccccccacccctcagcccatcgtgaaacgacagctgtcagcctggggggcggctgctgaggaggtgcagcaggaatggggctgggccctgaggttttactttccgagccaatggcccctggaacatgccagcacacactgccatgtcctggggctaagagctgcctttagggacaggctcgtgttgtccagtttgccctgagagatgcacctgaccaggggcccgtcgtggctgcaacccacggtggtatgttagtgtttccaggcagttgtcagcagctgccgggtagtgtgtgtgtgcgacagcaggagagttcctggaggaaagggactggggacactttctcagaggttctcctgcctggaatcaagtgatgcgtgtccagaaggcaagagagggcggctccgcctggttaaagtttgggaacgggacggagccaactcctccttccaggactgtgggccccactcttttgcgctaacacttcccctccctcgggtcactgaggaaagagctgctctgtcccctccagtgccctgaaggtccctggcctccactggctgccatggcagggggcccttctgacaggggctgccccaagctgctgttcctcctctgaaccttcaccccaacacccagcccgtggcccctgcaagggggaccctgccagctgggaaacccaaaggcctgtccaaacgtgcgcaccaggaccgaggggagctccctcccaacacctgctaggaattgccaacttttaaatggatggggttttttatgggttgaacctctgttaatacttttgtacactctcactacagtttatatttttataggctattttctcaaggtgtttctagattccacatatctattttatataacaagttattatgttatgtgtgtgactcccttgtgtgtatctgtgccagcctcagcctccgagttgcttttccctctggccctgactctcactgactcaccgatgtgatgtgcaggcccacttcttaccccagatagcctcgggcgctgcctgtagtcatgctgacagctgtacagtagccgccaagactgctgacagctggagacggttctggtttcaactacggtatattgatatcggaagtattctagacagatcctcggttgggttttctagctacatgtttgtattgcacagatccccacctgccatcctatagtgttgtcttcctgtgtgttccggggcttctgggcagctgggcctgcccggggaagtccttgcaggtgggaggccatacagagacccactgtgtgccactgagcgtcccactgctgctgggcaactggaggactgcagggggcgccaggtgactctctccttttatatcacagcagctcctgtgctgaccttcaagttacgttttggaactgtaatactaaaggaagaaataaactactaatttgtataat

SEQ ID NO: 488 - DNA, 675 bp, Homo sapiens
gcacgcgcaagattaggtggggcgccagagccggggcacctgcgcaggcttggctgcgccctctcgcgccgcacgctctgcgggttcctcccttcttccgagcctctcctctggccgccgcgcgggagagaggccgagatggcagatgagattgccaaggctcaggtcgctcggcctggtggcgacacgatctttgggaagatcatccgcaaggaaataccagccaaaatcatttttgaggatgaccggtgccttgctttccatgacatttcccctcaagcaccaacacattttctggtgatacccaagaaacatatatcccagatttctgtggcagaagatgatgatgaaagtcttcttggacacttaatgattgttggcaagaaatgtgctgctgatctgggcctgaataagggttatcgaatggtggtgaatgaaggttcagatggtggacagtctgtctatcacgttcatctccatgttcttggaggtcggcaaatgcattggcctcctggttaagcacgttttggggataattttctcttctttaggcaatgattaagttaggcaatttccagtatgttaagtaacacacttatttttgcctgtgtatggagagattcaagaaataattttaaaaccgcatacataataaaagacattgttgcatggctt

SEQ ID NO: 489 - DNA, 2640 bp, Homo sapiens
gagcagccatgctgggcgcgcgggcctggttgggccgcgtccttctgctgccccgcgccggtgcaggcctcgccgcgagccgcaggtgtcctggagtctggcccaggacctggccccacaggagtcccagcaggggtagctcctcccgggacaaggaccgaagtgcgacggtcagtagttcagtgcccatgcctgctggagggaaaggaagccatccttcatctacaccccagagggtccccaaccgcctgatccacgagaagtcaccatacctcctacaacatgcctacaatcctgtggactggtacccctggggacaggaagccttcgacaaggccaggaaggaaaacaagccgattttcctctcagtcgggtactccacctgccactggtgccacatgatggaagaggagtccttccagaatgaggagattggccgcctgctcagtgaggactttgtgagtgtgaaggtagaccgtgaggagcggcctgacgtggacaaggtgtacatgacgttcgtgcaggccaccagcagcggcgggggctggcccatgaatgtgtggctgactcccaacctccagccctttgtcgggggcacctatttccctcctgaggatggcttgacccgagtcggcttccgcacagtgttgctgagaatacgagaacagtggaaacagaacaagaacaccctgctagaaaatagccagcgtgtcaccactgccctgctggcccgatcagagatcagcgtgggtgaccgccagctgccgccctctgccgccaccgtgaacaatcgctgcttccagcagctggatgagggctatgatgaggaatacggtggcttcgctgaggcccccaagtttcccacgccggtgatcctgagcttcctgttctcctactggctcagccatcgactgactcaggatggctctcgggcccagcagatggccttgcataccctgaaaatgatggctaacgggggcatccgggaccatgtggggcagggctttcaccgctactccacagaccgccagtggcacgtccctcactttgagaagatgctctatgaccaggcacagctcgctgtggcctattcgcaggccttccagctctctggtgatgaattctactctgacgtggccaaaggcatcctgcagtacgtggctcggagcctgagccaccggtccggaggcttctatagcgcagaagatgcagactcgcccccagagcggggccagcggcccaaagagggcgcctactatgtgtggacggtcaaagaggttcagcagctcctcccggagcctgtgttgggtgccaccgagccgctgacctcaggccagctcctcatgaagcactacggcctcacagaggctggtaacatcagccccagtcaggaccccaagggggagctgcagggccagaatgtgctgaccgtccggtactcgctggagctgactgctgcccgctttggcttggatgtggaggccgtgcggaccttgctcaattcagggctggagaagctcttccaggcccggaagcatcggcccaagccgcacctggacagcaagatgctggctgcctggaatggcttgatggtgtcaggctatgctgtgactggggctgtcctgggccaagacaggctgatcaactatgccaccaatggtgccaagttcctgaagcggcacatgtttgatgtggccagtggccgcctgatgcggacctgctacaccggccctggggggactgtggagcacagcaacccaccctgctggggcttcctggaggactacgccttcgtggtgcggggcctgctggacctgtatgaggcctcacaggagagtgcgtggctcgagtgggctctgcggctgcaggacacacaggacaagctcttttgggactcccagggtggcggctacttctgcagtgaggctgagctgggggctggcctgcccctgcgtctgaaggacgaccaggatggagcagagcccagcgccaattccgtgtcagcccacaacctgctccggctgcatggcttcacgggccacaaggactggatggacaagtgtgtgtgcctattgaccgccttttccgagcgcatgcgtcgtgtcccggtggcgttgcccgagatggtccgcgccctctcagcccagcagcagaccctcaagcagatcgtgatctgtggagaccgtcaggccaaggacaccaaggccctggtgcagtgcgtccactctgtctacattcctaacaaggtgctgattctggctgatggggacccctcgagcttcctgtcccgccagctgcctttcctgagtaccctccgacggttggaagaccaggccactgcatatgtgtgtgagaatcaagcctgctcagtgcccatcactgatccctgcgaattacgaaaactactacatccatgactgccccaacccccttggggtggggcagaaggtgaagcatcccaactgactagagactcaggccctgcagggccctatagaacctgtggccatccctgagcaccctgccaccaggtgacctcggccatactcactgccccccttgggcacccactcaccctagaataaacttaacagtgtcccgtggtaaaaaaaaaaaaaaaaaaaaaaaaaaaaaaaaaaa

SEQ ID NO: 490 - DNA, 1889 bp, Homo sapiens; identical to SEQ ID NO: 291

SEQ ID NO: 491 - DNA, 2482 bp, Homo sapiens
gacttccggccgcgcagcggtgggctgagctaaaatggctgaggagagagtcgcgacgagaactcaatttcctgtatctactgagtctcaaaaaccccggcagaaaaaagctccagagtttcctattttggagaagcagaactggttgattcatcttcattatatccggaaagattatgaagcctgcaaggctgttatcaaagaacagcttcaagagactcagggattgtgtgaatatgctatctatgtccaagcattgatatttcgcctagaaggaaatatccaagaatccctagaactcttccagacatgtgcagttcttagtcctcagagtgctgataacctcaagcaggtggccagatctttatttcttttgggaaaacataaagctgccattgaagtatataatgaagcagctaaactcaaccagaaagattgggagatcagccataacctaggagtttgctacatatacctgaagcagttcaacaaggcacaagaccagttgcacaatgccctgaatcttaataggcacgatctgacttatataatgctggggaagatccacttgctggagggagacttggacaaggccattgaagtctacaagaaagcagtggagttctcaccagaaaatacagagcttcttacaactttaggattactctacttacagctcggcatttaccagaaggcatttgaacatcttggcaatgcactgacttatgaccctaccaactacaaggccatcttggcagcaggcagcatgatgcagacccacggggactttgatgttgccctcaccaaatacagagttgtggcttgtgctgttccagaaagtcctccactctggaataacattggaatgtgtttctttggcaagaagaaatatgtggcggccatcagctgcctgaaacgagccaactacttggcacccttcgattggaagattctgtataatttgggccttgtccatttgaccatgcagcagtatgcatcagcttttcattttctcagtgcggccatcaacttccagccaaagatgggggagctctacatgctcttggcagtggctctgaccaatctggaagatatagaaaatgccaagagagcctacgcagaagcagtccacctggataagtgtaaccctttagtaaacctgaactatgctgtgctgctgtacaaccagggcgagaagaagaacgccctggcccaatatcaggagatggagaagaaagtcagcctactcaaggacaatagctctctggaatttgactctgagatggtggagatggctcagaagttgggagctgctctccaggttggggaggcactggtctggaccaaaccagttaaagatcccaaatcaaagcaccagaccacttcaaccagcaaacctgccagtttccagcagcctctgggctctaatcaagctctaggacaggcaatgtcttcagcagctgcatacaggacgctcccctcaggtgctggaggaacatcccagttcacaaagcccccatctcttcctctggagccagagcctgcggtggaatcaagtccaactgaaacatcagaacaaataagagagaaataagaatagaatgaatgaccccaaaatagggttttcttgggcgaggatgtgctggattaggaaaggtgacatgacacaggcagagcagagtggcacccaccacagaatacagtgtgtgttattacgaggagccagcagttgagcctaaggtccttctacctacctggtattggcatttgaggtcggaaaccctctactgccccataagccaggaaaagtgaaaagagaacacagttcctttaagaactggcagcaaggcttgaggccttatgtatgtagctgagtcagcaaggtacatgatgctgtctgctttcaaaaggacttttctctcctagctgactgactccttccttagttcaaggaacagctgagacagacctctgctgagtagctctgtgatgacaaagccttggtttaactgaggtgatcctcaggttgtgaggtttattagtccccaaggcaaacacaaatattagattaataatccaactttaatagtatacatttaaaagaaaaaaaacaaaagccctggaagttgaggccaagcctgctgagtattgcagctgcatttgcccaaagggaatccagaacaagtccctccctgtattttgttcttgagaggggtcagtctagaagctagatcctatcaggatgaggagcagcagcccagggcttgtctggatcagcaccaacgattttaaagaaaaaaggaagagtttcttagatgagtaattgttattgaagatagtcagtgataaccactgaccagatgctatcaatacactatgtgtcctttttagaataaagattacatatcatcattcctttggggaaaattgttattcaggtataaaaacaagagatcataataaaaacctaaaagaacctatg

SEQ ID NO: 492 - DNA, 5215 bp, Homo sapiens
cgagcgcggcgcccttgagctgcaccgcggcgcaggtttgcgagccgacttgtcagccggccaagaaaaggaagctccgtcccttcccgctcacccggcttccccaccccttgtactctaaactctgcagagggcgagcggcgcggccacggaggcgccgaggaggagcgagccgccgccgggcagcggcgtgccctcgggggagagggcgccggagaggaggcggcggcgcggcggcgagggcgcggcgcgcgatggcagctgcttagcccggcgggcgcggagcagccccgagctgtggctggccaggcggtgcggctgggcgggggacgccgccgccgttgctgcccggcccggagagatgagcacggaggcggacgagggcatcactttctctgtgccacccttcgccccctcgggcttctgcaccatccccgagggcggcatctgcaggaggggaggagcggcggcggtgggcgagggcgaggagcaccagctgccaccgccgccgccgggcagcttctggaacgtggagagcgccgctgcccctggcatcggttgtccggcggccacctcctcgagcagtgccacccgaggccggggcagctctgttggcgggggcagccgacggaccacggtggcatatgtgatcaacgaagcgagccaagggcaactggtggtggccgagagcgaggccctgcagagcttgcgggaggcgtgcgagacagtgggcgccaccctggaaaccctgcattttgggaaactcgactttggagaaaccaccgtgctggaccgcttttacaatgcagatattgcggtggtggagatgagcgatgccttccggcagccgtccttgttttaccaccttggggtgagagaaagtttcagcatggccaacaacatcatcctctactgtgatactaactcggactctctgcagtcactgaaggaaataatttgccagaagaatactatgtgcactgggaactacacctttgttccttacatgataactccacataacaaagtctactgctgtgacagcagcttcatgaaggggttgacagagctcatgcaaccgaacttcgagctgcttcttggacccatctgcttacctcttgtggatcgttttattcaacttttgaaggtggcacaagcaagttctagccagtacttccgggaatctatactcaatgacatcaggaaagctcgtaatttatacactggtaaagaattggcagctgagttggcaagaattcggcagcgagtagataatatcgaagtcttgacagcagatattgtcataaatctgttactttcctacagagatatccaggactatgattctattgtgaagctggtagagactttagaaaaactgccaacctttgatttggcctcccatcaccatgtgaagtttcattatgcatttgcactgaataggagaaatctccctggtgacagagcaaaagctcttgatattatgattcccatggtgcaaagcgaaggacaagttgcttcagatatgtattgcctagttggtcgaatctacaaagatatgtttttggactctaatttcacggacactgaaagcagagaccatggagcttcttggttcaaaaaggcatttgaatctgagccaacactacagtcaggaattaattatgcggtcctcctcctggcagctggacaccagtttgaatcttcctttgagctccggaaagttggggtgaagctaagtagtcttcttggtaaaaagggaaacttggaaaaactccagagctactgggaagttggattttttctgggggccagcgtcctagccaatgaccacatgagagtcattcaagcatctgaaaagctttttaaactgaagacaccagcatggtacctcaagtctattgtagagacaattttaatatataagcattttgtgaaactgaccacagaacagcctgtggccaagcaagaacttgtggacttttggatggatttcctggtcgaggccacaaagacagatgttactgtggttaggtttccagtattaatattagaaccaaccaaaatctatcaaccttcttatttgtctatcaacaatgaagttgaggaaaagacaatctctatttggcacgtgcttcctgatgacaagaaaggtatacatgagtggaattttagtgcctcttctgtcaggggagtgagtatttctaaatttgaagaaagatgctgctttctttatgtgcttcacaattctgatgatttccaaatctatttctgtacagaacttcattgtaaaaagttttttgagatggtgaacaccattaccgaagagaaggggagaagcacagaggaaggagactgtgaaagtgacttgctggagtatgactatgaatatgatgaaaatggtgacagagtcgttttaggaaaaggcacttatgggatagtctacgcaggtcgggacttgagcaaccaagtcagaattgctattaaggaaatcccagagagagacagcagatactctcagcccctgcatgaagaaatagcattgcataaacacctgaagcacaaaaatattgtccagtatctgggctctttcagtgagaatggtttcattaaaatcttcatggagcaggtccctggaggaagtctttctgctctccttcgttccaaatggggtccattaaaagacaatgagcaaacaattggcttttatacaaagcaaatactggaaggattaaaatatctccatgacaatcagatagttcaccgggacataaagggtgacaatgtgttgattaatacctacagtggtgttctcaagatctctgacttcggaacatcaaagaggcttgctggcataaacccctgtactgaaacttttactggtaccctccagtatatggcaccagaaataatagataaaggaccaagaggctacggaaaagcagcagacatctggtctctgggctgtacaatcattgaaatggccacaggaaaacccccattttatgaactgggagaaccacaagcagctatgttcaaggtgggaatgtttaaagtccaccctgagatcccagagtccatgtctgcagaggccaaggcattcatactgaaatgttttgaaccagatcctgacaagagagcctgtgctaacgacttgcttgttgatgagtttttaaaagtttcaagcaaaaagaaaaagacacaacctaagctttcagctctttcagctggatcaaatgaatatctcaggagtatatccttgccggtacctgtgctggtggaggacaccagcagcagcagtgagtacggctcagtttcacccgacacggagttgaaagtggaccccttctctttcaaaacaagagccaagtcctgcggagaaagagatgtcaagggaattcggacactctttttgggcattccagatgagaattttgaagatcacagtgctcctccttcccctgaagaaaaagattctggattcttcatgctgaggaaggacagtgagaggcgagctacccttcacaggatcctgacggaagaccaagacaaaattgtgagaaacctaatggaatctttagctcagggggctgaagaaccgaaactaaaatgggaacacatcacaaccctcattgcaagcctcagagaatttgtgagatccactgaccgaaaaatcatagccaccacactgtcaaagctgaaactggagctggacttcgacagccatggcattagccaagtccaggtggtactctttggttttcaagatgctgtcaataaagttcttcggaatcataacatcaagccgcactggatgtttgccttagacagtatcattcggaaggcggtacagacagccattaccatcctggttccagaactaaggccacatttcagccttgcatctgagagtgatactgctgatcaagaagacttggatgtagaagatgaccatgaggaacagccttcaaatcaaactgtccgaagacctcaggctgtcattgaagatgctgtggctacctcaggcgtgagcacgctcagttctactgtgtctcatgattcccagagtgctcaccggtcactgaatgtacagcttggaaggatgaaaatagaaaccaatagattactggaagaattggttcggaaagagaaagaattacaagcactccttcatcgagctattgaagaaaaagaccaagaaattaaacacctgaagcttaagtcccaacccatagaaattcctgaattgcctgtatttcatctaaattcttctggcacaaatactgaagattctgaacttaccgactggctgagagtgaatggagctgatgaagacactataagccggtttttggctgaagattatacactattggatgttctctactatgttacacgtgatgacttaaaatgcttgagactaaggggagggatgctgtgcacactgtggaaggctatcattgactttcgaaacaaacagacttgactgttgctcaatctaatcttcgatggaaattctaaaaattaatacagagctgatcttcttgggggtgggaaaatcgaagggagaggagaaaggcgctgcactttaaatccagtatttgtttactcatgttaaaaaaaaaaaaaacagacaaaacacactgaaatttcctaactacatctatttctataatttttaaggactcttcataaggactcttaaaataatcctgaacattagaaccctaatgttcaggaagattttaatctaagcatttttatggaaatatttttaatgcagcagctattgcacttcagccaaatgtttatttcacacaaaacggatgtaacatttcatgtgatcgtgcaccactggaacaaaaccaaaatgtgaccataactgtttaggcttctgtgtgtttgtaatatgctctaataatctgagtagaaatgcgtaatttcaattactgtataaagtttatgtttttttaagtgtgcagaatctgagagcaatggtttttacttctctgtgttaattgtaatattgactctattttgtaacttaagtttctgacctgtcgtacatttgtttgagtcgtttatgtactactgaactgtaccagttgcacatgcttgaactgtagtaatgttagcttgttctaaagctatccattgtgtcatatttactctaaaaattaaagagactctcaacaaaaaaaaaaaaaaaaaaaaa

SEQ ID NO: 493 - DNA, 6683 bp, Homo sapiens
gcatttcttccttctgcgtatgggacaggaccctttctggaatgggggtcttatgacctacaatcaaacaagaacatggacttcccgtgcctctggctagggctgttgctgcctttggtagctgcgctggatttcaactaccaccgccaggaagggatggaagcgtttttgaagactgttgcccaaaactacagttctgtcactcacttacacagtattgggaaatctgtgaaaggtagaaacctgtgggttcttgttgtggggcggtttccaaaggaacacagaattgggattccagagttcaaatacgtggcaaatatgcatggagatgagactgttgggcgggagctgctgctccatctgattgactatctcgtaaccagtgatggcaaagaccctgaaatcacaaatctgatcaatagtacccggatacacatcatgccttccatgaacccagatggatttgaagccgtcaaaaagcctgactgttattacagcatcggaagggaaaattataaccagtatgacttgaatcgaaatttccccgatgcttttgaatataataatgtctcaaggcagcctgaaactgtggcagtcatgaagtggctgaaaacagagacgtttgtcctctctgcaaacctccatggtggtgccctcgtggccagttacccatttgataatggtgttcaagcaactggggcattatactcccgaagcttaacgcctgatgatgatgtttttcaatatcttgcacatacctatgcttcaagaaatcccaacatgaagaaaggagacgagtgtaaaaacaaaatgaactttcctaatggtgttacaaatggatactcttggtatccactccaaggtggaatgcaagattacaactacatctgggcccagtgttttgaaattacgttggagctgtcatgctgtaaatatcctcgtgaggagaagcttccatccttttggaataataacaaagcctcattaattgaatatataaagcaggtgcacctaggtgtaaagggtcaagtttttgatcagaatggaaatccattacccaatgtaattgtggaagtccaagacagaaaacatatctgcccctatagaaccaacaaatatggagagtattatctccttctcttgcctgggtcttatataataaatgttacagtccctggacatgatccacacatcacaaaggtgattattccggagaaatcccagaacttcagtgctcttaaaaaggatattctacttccattccaagggcaattggattctatcccagtatcaaatccttcatgcccaatgattcctctatacagaaatttgccagaccactcagctgcaacaaagcctagtttgttcttatttttagtgagtcttttgcacatattcttcaaataaagtaaaatgtgaaactcaacccacatcaccacctggaatcagggattgctcactccaggttactgcaaccctaactcactctagtgggaccttgactggagaaactccacgatcttcctgaagaagagaaatggatgtttccaaattccacaataagcaatatgtggtgataatgaaaagaatgattcagtcttgacggtgaatggaagacacttacctaacaagtactgctcatttacactcaaattaatcttgaagtagtcttaaaatgtgtaagaagttaaaacttgagaagcaaaaaaatgcctgcaaaaagaagatcattttgtatacagagaaccggatgaatataagcaatgaagatgaacatttattgatcttctacatacaagacttcaccataaggccaggagcagtggctcacaccttgtaatcccagcactttgggaggccaaggtgggcggatcaccctgaggtcaggagttcaaaaccagcctgaccaacatggtgaaaccctgtctctactaaatattagcggggtgtggtggcgggcacctgtaatcgcagcctttcaggaggctgagacaggagaatcgcttgaaccctagaggcggagtttgcagtgagccgagatagtgccattgtactccagcttgggcaacagagtaagactctgtctcaaaaaaaaaaaaacaaaaacaaacaaacaaaaaaaacacctcaccatgagtgctacatgtgaatagatattaagtgccatatataattagttctcagaagaagggagaaatgatcataggactgggaattgttttgcaaacgttctaggagatgtgagagaaaatatgtaaccacatcttagtggcccaagaaaatacaggcctgaagggataagattgtgtctctatagagcttcaaagcatacaggtcaattaagaaagcccctctctctccagagccgtttccctagcttttggcacctggatgccacagtcctccattaggctgatgactccaaagatgtaactctagcctcttgcctgagcttcagactcgcgtcccactgcccacaggacacatccacctggatgtgactcacaggtacctccaacccatcatgtggagatactcatcctgttccccctagagctgctcttcctgctgcattctctctctcaattactgggaccaccaagctaggaacctgggagtcatccttgatactttctcttcctccttaatcctgtgtattcagcaagtaactaaaggttggtgttggccaggcatggtggctcatgcctgtaatcccagcattttgggaggccaaggcgggcggatcacttgaggtcaggagctcaagaccagcctggccaacatggtgaaaccccatctctactaaaaaaaaaaaaaaaattagtcgggcgtggtggtgcatgcctgtaatcccagctactggggaggctgaggcaggagaatcgcttgaacctgggaggcagaggttgcagtgagccgggattgcgccattgtactccagcctgggtgaagaagtgagactctgtcttaaaaaaaaaaattggtgctgataaatattgatgaattctgctctctgctctctatggttgtcaacactgcagagttgaggcctcatatctcacctgcactgctgcaacagcttactggtcccttgctcccagccttctcctcttcagtccatcgtccacacagcactggggaaggggagccacttgaaacaaaagtcaacaactggttgtagttcataaacacagagctgtttgtgtcccctgtatctggaatgccattatgacccactacattttttctttcctacccctcttaaaactcagttcaggtagcagctccactaggaagccttggctgaccataatcccattcaattccatttcacctcttcgcaggcagtctggggttagggaccctttctctttgctccccaaaataaactggttatctctactattggatttacaacattgtattataatcttctccatgtgtgccttctctagtagaatgtgagctctttgaggccaaggtctatttaatttgtttgaaaaattcattgttatatcctcaaagcctagcacatagtaggtactgaatgaatgaatgaacaaggggtgccaggagactgctactcccagtccttcccagaaactgcctagggctttgagtcattttatgaagctaggtcttaatgcgtaggcaacctcccagctcactatgaacgctgacagaagagtgttttcatgtctataatcaagaattccagatacattccttttactgaaccttgaattgatcctaagattggtagtaaaggtattatgttactcctaacagcactacaaagtacctttttttatcagaaaaaaattttaccattaggactcaatttgaagtactaatgcttctcaagttctccactatgagagttaccctgtattagaccgttacctataagaattaaggggtaaagcactaaacagaaaagaaaaaaaaaatagcaactctggtgagcagatttctttcctttcttccttccttctcctcttcctaccttcctccctcctttccctctcctccccttctctccctttccctccccttcccttccttttcttctttcctccgctcccctccccttccctccccttcccatccttctttctcttttttttacttaatccccagtgtgacagtaatataggctgatttctagaagtgtggtgtattactcatggaaagtgagttgccttggttattactttcaattgaaagttctatgggatctagaaatgagacatactggcatggagagtgagaacgacaaaggaatgaagagctacaggagcatttaggccatttctatgccaagcttattctacatgcacaaaatcatacatgttaataaatataaacaaattggaggcttatttaaaccaattatgaaatctggtaatttgtgcagcagcaatagatgataaccaaaaaaaactcataataatctgaatatcttgatcatttgtatttaaagaagcagtaattatatacttgaaagtacataatatagtattgcaaaaatgactttggtatattacaaattaaaagtatataagatgaaacttgatttgctatcaagccccaagcaatttttcaactgggcattgaattctaacttttctaagatagcaatttttgaagagacacgaacaaaaatctgaattagttcatgagccttaatgtaaatctcttgctgaaatagtttttaaaatcagaatttagttatctatcagactcaaaatcatttaaagactaacaaaacacaatcatgatattctaactgtggtcaaaccaggtacccaagccacctccctgcccaacgcctttccggcttttcccctccctcttgggctggtggttatgctcctccagctctagttcagctataattccttttatagagaaaccaacctgatacacactttcatgatgggagaaaaatgtgggagtgaaatgatatttagaaagcagcagtcaggcacggtggctcatgcctgtaatcccagcactttgggaggctgaggcaggcggatcacttgaggtcaggagctcgagaccagcctggccaacacggtgaaaccccatctctactaaaaaaaaatacaaaaattagccgggcgtggtggcaggcacctgtaatcccagctacttgggaggctgaggcaggagaaatcgcctgaacccagaaggcagaggttgcagtgagccaagatcacatcactgcactgcactccagccggggtgacagagcgaacctctgtctcaaaaaaaaaaaaagaaaaaagaaagaaagaaaaaaggcagaagccctggattcaaatccgccacacattcagtttctttatctgtaaaatggagaccaccccccgccacgctgaacggtgattctgtgactggtaagagatgctacatttttggtgcttgttcaggtggaggaaagatgatagttaacactcaggtaataagtattttgaaggcagtataatataccttcttaaagagtatacctactcaaatgttggtaaatgttgacatgattgaatctaaatggcaaagagtattttagaaaaacattaagtccctgcagataaatgacagtgttgatttggatgcttaattacattcagacatgaactgttggatgtatccgaaatgttaaaagctttttctcaacatttccaaaagtctttccaagaaatcaatgttatgttttgttccagaagcaaatttgcatttgtgatctgtttctaaaaatggtacaagttagctctgtttagaaagtaaaaatatctgatgttagattggaagtatctcttcctggggaatccagaaagataagcatagcatattgtcttactgcaatagataagttgcttattgagaagtctggttgttattctatatggtaacaatacagttgatgtatattttatgatagatcctttatattttcctcatgactttagaagggggaagggggagaaaattatgatgaccagactagttaaagagcattgaaagtccacagtactgtagctaaagtagaagtttgggtttgttatagactttacattatatcaactaataagcagatactgtacagtattgctcaccattttatcatacttttgcatatgaactactccattgccttttatagatgttttatagctgatcttaccagttttcctggtaactttttttatttcttttttttttttttgagacggagtctcgccctaacacccaggttggagtgcagtgccgtgatctcggctcactgcaacctctgcctcccgggttcaagcaattctcctgtctcagcctcccgagtacctgggactaccggtgcctgtctccacgcccggctaattttttgtatttgtagtggagacggggtttcaccgtgttggccaggatggtctcgatctcctgacctcatgatctgcctgcctctgcctggacctcccaaagtgctgggattacaggcgtgagcccccgcgcccagccactttctttaatactataactaagaatttattaaaatgcacaaattgtctaagactgtaaagtttattggggagaggccatgactacctctgaatttagtaaatttaaaatatttctgattctcaataaagaactaatatccatataaaaaaaaaaaaaaaaaa

SEQ ID NO: 494 - DNA, 2446 bp, Homo sapiens
cgcgactgcacctccaagcggcccggaacccgcggcttccctggctcccgtgagcatctcaccgggcggcactggccagcgccagccctcgggccggcccggatgaccagactcctgtagacacccgccgccctctcccggctcggcgcagccgccgcccgcgcgcgactcgccccgggaccccgcacaggttgaagaaatatggagatcaacacaaaactgctcatcagtgttacctgtatcagctttttcacctttcagcttcttttctactttgtaagttactggttttcagcaaaagtttccccaggtttcaatagtctcagcttcaaaaagaagattgaatggaactcaagggtagtatccacatgccattctttggtggttggtatttttggcctgtacattttcttattcgatgaggctactaaagctgatccactttggggtggtccatcacttgcaaacgtgaatattgctattgcctcaggctacctcatttctgatttgtccattataattttgtattggaaagtgattggtgacaaattttttataatgcatcattgtgcgtccctgtatgcatactaccttgtactgaaaaatggagtgctggcatacattgggaattttcgcctgcttgcagagctttccagcccgtttgtgaatcagcggtggttctttgaagctctgaagtatcccaagttttctaaagctatcgttatcaatggaatactcatgacagtagtattcttcatcgtgcggattgcctcaatgcttcctcattatggcttcatgtattccgtgtatggaacagaaccctacataaggcttggagttttaatccagttatcctgggtcattagttgtgttgttttggatgtgatgaatgtcatgtggatgatcaaaatttcaaaaggttgcatcaaagtcatctctcacatcagacaagagaaagccaaaaatagtcttcagaatggaaaacttgattaaaagagtgctaccgataagcaaacttcattactacccagcatatctgctgataggatgaattcttggcatgtttttgtgtacctttcttaattataattgttattcaggatttcagtgtcattttttttaaaccttagaaaagagaaggccgggcacggtggctcatgcctgtaatcccagcactttgggaggccaaggtgggtcgatcactgaggtcaggagttcgagactagcttggccaacatggtgaaacctcatctctactaaaaatacaaaaaaaagtagctgggcgtggtggttggcgcctgtaatcccagctactcgggaggctgaggcaggagaatcgcttgaacccgagagacggaggttgcagtgagctgatattgtgccactgcactccagcctgggcgacagagcaagactctgtctcaaaaaaaaaaaaaaaaaagagagaaactaaaattaaaatttagttttcatcccaagatgtcttttctgcctttcttttgccttatttacaagcatggataaaaatcttaaaggtttaaataaaaatgatcaatataatggtgaatcttttgagaaatctcttaactgcattggtattttttctctgtgaaagatgactatgataatctggtacaaatggttttatgtcaccaattttgctgcaagaatgggaactgcttttaaatctgtaaatagctcttaacatttgttgtatgcactcttttcttactatggctgtcaacacttgtgtagggtttaatttctaaattgttggcatgttctttttctcaggctattcagaagtaacaacatttttcatttcagacatgcaatcacctattaatgatgaaatattttaccactttgggaatatttaattagtttagtcatggagaatacttcccacattttaagatttttcaaatatcactgtcatttctattttagcattttatcaaattattgcttttttattttataataaggcttaagacagattatagacctccttaagagatgagtttcttcttctaaaaatgcatgttgatagaggactatttaggctaatcggaggaatcattaagaaagaaagttttaacactgtttatccctatctgctttccttgcactttttctgtgaaaaatattttctgtttgcaaaatcttccctgagttctgaacccagcaccatcagtaccaaagtcttatgcaatatgtatttattatgctcctgaaataggcctcttcttgatgagacccaaactattacaaaaatatcagtattcatattttactcacaattcatacccgtgcttacttagttggcattttagtgctttgaatttctatcttaaagcacagaaaaaaaaaggtaatttaatccaagtattctatcatcaaaattattgtctgattatatgaagataaatgactggcgactctg

SEQ ID NO: 495 - DNA, 4950 bp, Homo sapiens
cagagcagggtggagagggcggtgggaggcgtgtgcctgagtgggctctactgccttgttccatattattttgtgcacattttccctggcactctgggttgctagccccgccgggcactgggcctcagacactgcgcggttccctcggagcagcaagctaaagaaagcccccagtgccggcgaggaaggaggcggcggggaaagatgcgcggcgttggctggcagatgctgtccctgtcgctggggttagtgctggcgatcctgaacaaggtggcaccgcaggcgtgcccggcgcagtgctcttgctcgggcagcacagtggactgtcacgggctggcgctgcgcagcgtgcccaggaatatcccccgcaacaccgagagactggatttaaatggaaataacatcacaagaattacgaagacagattttgctggtcttagacatctaagagttcttcagcttatggagaataagattagcaccattgaaagaggagcattccaggatcttaaagaactagagagactgcgtttaaacagaaatcaccttcagctgtttcctgagttgctgtttcttgggactgcgaagctatacaggcttgatctcagtgaaaaccaaattcaggcaatcccaaggaaagctttccgtggggcagttgacataaaaaatttgcaactggattacaaccagatcagctgtattgaagatggggcattcagggctctccgggacctggaagtgctcactctcaacaataacaacattactagactttctgtggcaagtttcaaccatatgcctaaacttaggacttttcgactgcattcaaacaacctgtattgtgactgccacctggcctggctctccgactggcttcgccaaaggcctcgggttggtctgtacactcagtgtatgggcccctcccacctgagaggccataatgtagccgaggttcaaaaacgagaatttgtctgcagtggtcaccagtcatttatggctccttcttgtagtgttttgcactgccctgccgcctgtacctgtagcaacaatatcgtagactgtcgtgggaaaggtctcactgagatccccacaaatcttccagagaccatcacagaaatacgtttggaacagaacacaatcaaagtcatccctcctggagctttctcaccatataaaaagcttagacgaattgacctgagcaataatcagatctctgaacttgcaccagatgctttccaaggactacgctctctgaattcacttgtcctctatggaaataaaatcacagaactccccaaaagtttatttgaaggactgttttccttacagctcctattattgaatgccaacaagataaactgccttcgggtagatgcttttcaggatctccacaacttgaaccttctctccctatatgacaacaagcttcagaccatcgccaaggggaccttttcacctcttcgggccattcaaactatgcatttggcccagaacccctttatttgtgactgccatctcaagtggctagcggattatctccataccaacccgattgagaccagtggtgcccgttgcaccagcccccgccgcctggcaaacaaaagaattggacagatcaaaagcaagaaattccgttgttcagctaaagaacagtatttcattccaggtacagaagattatcgatcaaaattaagtggagactgctttgcggatctggcttgccctgaaaagtgtcgctgtgaaggaaccacagtagattgctctaatcaaaagctcaacaaaatcccggagcacattccccagtacactgcagagttgcgtctcaataataatgaatttaccgtgttggaagccacaggaatctttaagaaacttcctcaattacgtaaaataaactttagcaacaataagatcacagatattgaggagggagcatttgaaggagcatctggtgtaaatgaaatacttcttacgagtaatcgtttggaaaatgtgcagcataagatgttcaagggattggaaagcctcaaaactttgatgttgagaagcaatcgaataacctgtgtggggaatgacagtttcataggactcagttctgtgcgtttgctttctttgtatgataatcaaattactacagttgcaccaggggcatttgatactctccattctttatctactctaaacctcttggccaatccttttaactgtaactgctacctggcttggttgggagagtggctgagaaagaagagaattgtcacgggaaatcctagatgtcaaaaaccatacttcctgaaagaaatacccatccaggatgtggccattcaggacttcacttgtgatgacggaaatgatgacaatagttgctccccactttctcgctgtcctactgaatgtacttgcttggatacagtcgtccgatgtagcaacaagggtttgaaggtcttgccgaaaggtattccaagagatgtcacagagttgtatctggatggaaaccaatttacactggttcccaaggaactctccaactacaaacatttaacacttatagacttaagtaacaacagaataagcacgctttctaatcagagcttcagcaacatgacccagctcctcaccttaattcttagttacaaccgtctgagatgtattcctcctcgcacctttgatggattaaagtctcttcgattactttctctacatggaaatgacatttctgttgtgcctgaaggtgctttcaatgatctttctgcattatcacatctagcaattggagccaaccctctttactgtgattgtaacatgcagtggttatccgactgggtgaagtcggaatataaggagcctggaattgctcgttgtgctggtcctggagaaatggcagataaacttttactcacaactccctccaaaaaatttacctgtcaaggtcctgtggatgtcaatattctagctaagtgtaacccctgcctatcaaatccgtgtaaaaatgatggcacatgtaatagtgatccagttgacttttaccgatgcacctgtccatatggtttcaaggggcaggactgtgatgtcccaattcatgcctgcatcagtaacccatgtaaacatggaggaacttgccacttaaaggaaggagaagaagatggattctggtgtatttgtgctgatggatttgaaggagaaaattgtgaagtcaacgttgatgattgtgaagataatgactgtgaaaataattctacatgtgtcgatggcattaataactacacatgcctttgcccacctgagtatacaggtgagttgtgtgaggagaagctggacttctgtgcccaggacctgaacccctgccagcacgattcaaagtgcatcctaactccaaagggattcaaatgtgactgcacaccagggtacgtaggtgaacactgcgacatcgattttgacgactgccaagacaacaagtgtaaaaacggagcccactgcacagatgcagtgaacggctatacgtgcatatgccccgaaggttacagtggcttgttctgtgagttttctccacccatggtcctccctcgtaccagcccctgtgataattttgattgtcagaatggagctcagtgtatcgtcagaataaatgagccaatatgtcagtgtttgcctggctatcagggagaaaagtgtgaaaaattggttagtgtgaattttataaacaaagagtcttatcttcagattccttcagccaaggttcggcctcagacgaacataacacttcagattgccacagatgaagacagcggaatcctcctgtataagggtgacaaagaccatatcgcggtagaactctatcgggggcgtgttcgtgccagctatgacaccggctctcatccagcttctgccatttacagtgtggagacaatcaatgatggaaacttccacattgtggaactacttgccttggatcagagtctctctttgtccgtggatggtgggaaccccaaaatcatcactaacttgtcaaagcagtccactctgaattttgactctccactctatgtaggaggcatgccagggaagagtaacgtggcatctctgcgccaggcccctgggcagaacggaaccagcttccacggctgcatccggaacctttacatcaacagtgagctgcaggacttccagaaggtgccgatgcaaacaggcattttgcctggctgtgagccatgccacaagaaggtgtgtgcccatggcacatgccagcccagcagccaggcaggcttcacctgcgagtgccaggaaggatggatggggcccctctgtgaccaacggaccaatgacccttgccttggaaataaatgcgtacatggcacctgcttgcccatcaatgcgttctcctacagctgtaagtgcttggagggccatggaggtgtcctctgtgatgaagaggaggatctgtttaacccatgccaggcgatcaagtgcaagcacgggaagtgcaggctttcaggtctggggcagccctactgtgaatgcagcagtggatacacgggggacagctgtgatcgagaaatctcttgtcgaggggaaaggataagagattattaccaaaagcagcagggctatgctgcttgccaaacaaccaagaaggtgtcccgattagagtgcagaggtgggtgtgcaggagggcagtgctgtggaccgctgaggagcaagcggcggaaatactctttcgaatgcactgacggctcctcctttgtggacgaggttgagaaagtggtgaagtgcggctgtacgaggtgtgtgtcctaaacacactcccggcagctctgtctttggaaaaggttgtatacttcttgaccatgtgggactaatgaatgcttcatagtggaaatatttgaaatatattgtaaaatacagaacagacttatttttattatgagaataaagactttttttctgcatttg

SEQ ID NO: 496 - DNA, 1374 bp, Homo sapiens
gggcagccccgccacccgcccgggcctcgacgggcgcgccgccagggctggggaggggcggcgcggagggcgggggccgggcgcagggcagggcccggctgtgcctcgccggccgctcgggcagctcccgggccgcggccagccgaggatcagagcgcttgccccgggggtctgtcgcgtcgcaggcgccgccggagccctggccatgaggaccctgtggatggcgctgtgcgcgctgtcgcggctgtggcccggggcccaggccggctgcgccgaggccgggcgctgctgtcccggccgggaccccgcctgcttcgcccgcggctggaggctggacagggtctacgggacgtgtttctgcgaccaagcctgtcgcttcaccggggactgctgcttcgactacgacagggcgtgcccagctcgcccgtgcttcgtgggggaatggagcccctggagtggttgtgcagaccagtgcaagcctacaacccgtgtgcggaggcgctcggtgcagcaggagcctcagaacggcggggcgccctgcccacccctggaagagagagctggctgcctggagtactccaccccgcagggccaggactgcgggcacacctatgttcctgcctttataactacctctgcattcaacaaggagagaacacgacaagctacgtctccacactggtctacacacacagaggatgctggatactgtatggagtttaagacagagtccttgactcctcactgtgctctggaaaactggcccttgactagatggatgcagtatctccgagagggatacacggtgtgtgtggattgtcagcctccagctatgaactctgtgagccttcgttgttctggagatggcctggactccgatggaaatcagactctccattggcaagcaattggtaatcctcggtgtcaaggaacttggaaaaaagttcggcgagtagaccagtgttcttgtccagctgttcacagttttatttttatatagatggtgatataaatatttccaaatgcatttgtaaacattctaaatattctcaagtcatgttcaatgtttcctaaaccttcaattttggccaaagtccccaaacacatcattgccacactctgaagtagagaaagaaaatttaggggccagttctcaaggaacacaggtcctttatttttattttaactaagttgaagacccactcaaaaagctcttgtggttttatgttcttgacctttcaactggagtcctctcattcagcaggtggcccgtgagacacagaatacatgtctgtttgctaaagtaaaattactgtaactcaaaaaaaaaaaaaaaaaaaaaaaaaaaaaaaaaaaaaaaaaaaaaaaaaaaaa

SEQ ID NO: 497 - DNA, 4930 bp, Homo sapiens
atgctgaagcggaggcggccgctgctcgaggatcaaacagagcatactgaatcagcaggactggctggtggtgcagcagacatcatgagtaagcaccgagaagtctgttccttatcacgtgtgtaaggggaaaaaggtttaaacaagtctcttaagtggtgtttcctcaccgatggagaattacttccaagcagaagcttacaacctggacaaggtgttagatgaatttgaacaaaacgaagatgaaacagtttcttctactttattggatacaaagtggaataagattctagatcccccttctcaccggctgtcatttaaccctactttggccagtgtgaatgaatctgcagtttctaatgagtcacaaccacaactgaaagtcttctccctggctcattcagctcccctgaccacagaggaagaggatcactgtgctaatggacaggactgtaatctaaatccagagattgccacaatgtggattgatgaaaatgctgttgcagaagaccagttaattaagagaaactatagttgggatgatcaatgcagtgctgttgaagtgggagagaagaaatgtggaaacctggcttgtctgccagatgagaagaatgttcttgttgtagccgtcatgcataactgtgataaaaggacattacaaaacgatttacaggattgtaataattataatagtcaatcccttatggatgcttttagctgttcactggataatgaaaacagacaaactgatcaatttagttttagtataaatgagtccactgaaaaagatatgaattcagagaaacaaatggatccattgaatagaccgaaaacagaggggagatctgttaaccatctgtgtcctacttcatctgatagtctagccagtgtctgttccccttcacaattaaaggatgacggaagtataggtagagacccctccatgtctgcgattacaagtttaacggttgattcagtaatctcatcccagggaacagatggatgtcctgctgttaaaaagcaagagaactatataccagatgaggacctcactggcaaaatcagctctcctaggacagatctagggagtccaaattccttttcccacatgagtgaggggattttgatgaaaaaagagccagcagaggagagcaccactgaagaatccctccggtctggtttacctttgcttctcaaaccagacatgcctaatgggtctggaaggaataatgactgtgaacggtgttcagattgccttgtgcctaatgaagttagggctgatgaaaatgaaggttatgaacatgaagaaactcttggcactacagaattccttaatatgacagagcatttctctgaatctcaggacatgactaattggaagttgactaaactaaatgagatgaatgatagccaagtaaacgaagaaaaggaaaagtttctacagattagtcagcctgaggacactaatggtgatagtggaggacagtgtgttggattggcagatgcaggtctagatttaaaaggaacttgcattagtgaaagtgaagaatgtgatttctccactgttatagacacaccagcagcaaattatctatctaatggttgtgattcctatggaatgcaagacccaggtgtttcttttgttccaaagactttaccctccaaagaagattcagtaacagaagaaaaagaaatagaggaaagcaagtcagaatgctactcaaatatttatgaacagagaggaaatgaggccacagaagggagtggactacttttaaacagcactggtgacctaatgaagaaaaattatttacataatttctgtagtcaagttccatcagtgcttgggcaatcttcccccaaggtagtagcaagcctgccatctatcagtgttccttttggtggtgcaagacccaagcaaccttctaatcttaaacttcaaattccaaagccattatcagaccatttacaaaatgactttcctgcaaacagtggaaataatactaaaaataaaaatgatattcttgggaaagcaaaattaggggaaaactcagcaaccaatgtatgcagtccatctttgggaaacatctctaatgtcgatacaaatggggaacatttagaaagttatgaggctgagatctccactagaccatgccttgcattagctccagatagcccagataatgatctcagagctggtcagtttggaatttctgccagaaagccattcaccactctgggtgaggtggctccagtatgggtaccggattctcaggctccaaattgcatgaaatgtgaagccaggtttacattcaccaaaaggaggcatcactgcagagcatgtgggaaggttttctgtgcttcctgctgtagcctgaaatgtaaactgttatacatggacagaaaggaagctagagtgtgtgtaatctgccattcagtgctaatgaatgctcaagcctgggagaacatgatgagtgcctcaagccagagccctaaccctaacaatcctgctgaatactgttctactatccctcccttgcagcaagctcaggcctcaggagctctgagctctccacctcccactgtgatggtacctgtgggagttttaaagcaccctggagcagaagtggctcagcccagagagcagaggcgagtttggtttgctgatgggatcttgcccaatggagaagttgctgatgcagccaaattaacaatgaatggaacttcctctgcaggaaccctggctgtgtcacacgacccagtcaagccagtaactaccagtcctctaccagcagagacggatatttgtctattctctgggagtataactcaggttggaagtcctgttggaagtgcaatgaatcttattcctgaagatggccttcctcccattctcatctccactggtgtaaaaggagactatgctgtggaagagaaaccatcacagatttcagtaatgcagcagttggaggatggtggccctgacccacttgtatttgttttaaatgcaaatttgttgtcaatggttaaaattgtaaattatgtgaacaggaagtgctggtgtttcacaaccaagggaatgcatgcagtgggtcagtctgagatagtcattcttctacagtgtttaccggatgaaaagtgtttgccaaaggatatctttaatcactttgtgcagctttatcgggatgctctggcagggaatgtggtgagcaacttgggacattccttcttcagtcaaagtttccttggcagtaaagaacatggtggattcttatatgtgacatctacctaccagtcactgcaagacctagtactcccaaccccaccttacttgtttgggattcttatccagaaatgggaaactccttgggctaaagtatttcctatccgtctgatgttgagacttggagctgaatatcgactttatccatgcccactattcagtgtcagatttcggaagccattgtttggagagacggggcataccatcatgaatcttcttgcagacttcagaaattaccagtataccttgccagtagttcaaggtttggtggttgatatggaagttcggaaaactagcatcaaaattcccagcaacagatacaatgagatgatgaaagccatgaacaagtccaatgagcatgtcctggcaggaggtgcctgcttcaatgaaaaggcagactctcatcttgtgtgtgtacagaatgatgatggaaactatcagacccaggctatcagtattcacaatcagcccagaaaagtgactggtgccagtttctttgtgttcagtggcgctctgaaatcctcttctggataccttgccaagtccagtattgtggaagatggtgttatggtccagattactgcagagaacatggattccttgaggcaggcactgcgagagatgaaggacttcaccatcacctgtgggaaggcggacgcggaggaaccccaggagcacatccacatccagtgggtggatgatgacaagaacgttagcaagggtgtcgtaagtcctatagatgggaagtccatggagactataacaaatgtgaagatattccatggatcagaatataaagcaaatggaaaagtaatcagatggacagaggtgtttttcctagaaaacgatgaccagcacaattgcctcagtgatcctgcagatcacagtagattgactgagcatgttgccaaagctttttgccttgctctctgtcctcacctgaaacttctgaaggaagatggaatgaccaaactgggactacgtgtgacacttgactcagatcaggttggctatcaagcagggagcaatggccagccccttccctcgcagtacatgaatgatctggacagcgccttggtgccggtgatccatggaggggcctgccagcttagtgagggccccgttgtcatggaactcatcttttatattctggaaaacatcgtataaacagagaagacttcatttttttctgttcagacttgttgcaacagcagtcatacccaaatcatttgcactttaaaactggaagattaagcttttgttaacactattaatggggtggggaatagggtgggagtgggggtttgggagacgggtgggaaagggtggttggggggaccgatgttccataattctaagtcttctatgcattgtccaccaagaagatctgggcagcttctgttcctgcacaacagttatgctatccttgcagctaatccccttctgttactgtttagacaagaattccgctcctctctcaagatttacttatggtcatgtgctcagaaatgctcaaatgggtacaaccatcaccaagggtgggatgggagggcagaggggaaataaaatataaagcatcagttcttgcactctttgtacagaattggtataaaaaggataattccacactgaaaaaaaaaaaaaaaa

SEQ ID NO: 498 - DNA, 3646 bp, Homo sapiens; identical to SEQ ID NO: 274

SEQ ID NO: 499 - DNA, 2568 bp, Homo sapiens
gccagggaccagtggtgggaggaggctgcggcgctagatgcggacacctggaccgccgcgccgaggctcccggcgctcgctgctcccgcggcccgcgccatgccctcctacacggtcaccgtggccactggcagccagtggttcgccggcactgacgactacatctacctcagcctcgtgggctcggcgggctgcagcgagaagcacctgctggacaagcccttctacaacgacttcgagcgtggcgcggtggattcatacgacgtgactgtggacgaggaactgggcgagatccagctggtcagaatcgagaagcgcaagtactggctgaatgacgactggtacctgaagtacatcacgctgaagacgccccacggggactacatcgagttcccctgctaccgctggatcaccggcgatgtcgaggttgtcctgagggatggacgcgcaaagttggcccgagatgaccaaattcacattctcaagcaacaccgacgtaaagaactggaaacacggcaaaaacaatatcgatggatggagtggaaccctggcttccccttgagcatcgatgccaaatgccacaaggatttaccccgtgatatccagtttgatagtgaaaaaggagtggactttgttctgaattactccaaagcgatggagaacctgttcatcaaccgcttcatgcacatgttccagtcttcttggaatgacttcgccgactttgagaaaatctttgtcaagatcagcaacactatttctgagcgggtcatgaatcactggcaggaagacctgatgtttggctaccagttcctgaatggctgcaaccctgtgttgatccggcgctgcacagagctgcccgagaagctcccggtgaccacggagatggtagagtgcagcctggagcggcagctcagcttggagcaggaggtccagcaagggaacattttcatcgtggactttgagctgctggatggcatcgatgccaacaaaacagacccctgcacactccagttcctggccgctcccatctgcttgctgtataagaacctggccaacaagattgtccccattgccatccagctcaaccaaatcccgggagatgagaaccctattttcctcccttcggatgcaaaatacgactggcttttggccaaaatctgggtgcgttccagtgacttccacgtccaccagaccatcacccaccttctgcgaacacatctggtgtctgaggtttttggcattgcaatgtaccgccagctgcctgctgtgcaccccattttcaagctgctggtggcacacgtgagattcaccattgcaatcaacaccaaggcccgtgagcagctcatctgcgagtgtggcctctttgacaaggccaacgccacagggggcggtgggcacgtgcagatggtgcagagggccatgaaggacctgacctatgcctccctgtgctttcccgaggccatcaaggcccggggcatggagagcaaagaagacatcccctactacttctaccgggacgacgggctcctggtgtgggaagccatcaggacgttcacggccgaggtggtagacatctactacgagggcgaccaggtggtggaggaggacccggagctgcaggacttcgtgaacgatgtctacgtgtacggcatgcggggccgcaagtcctcaggcttccccaagtcggtcaagagccgggagcagctgtcggagtacctgaccgtggtgatcttcaccgcctccgcccagcacgccgcggtcaacttcggccagtacgactggtgctcctggatccccaatgcgcccccaaccatgcgagccccgccaccgactgccaagggcgtggtgaccattgagcagatcgtggacacgctgcccgaccgcggccgctcctgctggcatctgggtgcagtgtgggcgctgagccagttccaggaaaacgagctgttcctgggcatgtacccagaagagcattttatcgagaagcctgtgaaggaagccatggcccgattccgcaagaacctcgaggccattgtcagcgtgattgctgagcgcaacaagaagaagcagctgccatattactacttgtccccagaccggattccgaacagtgtggccatctgagcacactgccagtctcactgtgggaaggccagctgccccagccagatggactccagcctgcctggcaggctgtctggccaggcctcttggcagtcacatctcttcctccgaggccagtacctttccatttattctttgatcttcagggaactgcatagattgatcaaagtgtaaacaccatagggacccattctacacagagcaggactgcacagcgtcctgtccacacccagctcagcatttccacaccaagcagcaacagcaaatcacgaccactgatagatgtctattcttgttggagacatgggatgattattttctgttctatttgtgcttagtccaattccttgcacatagtaggtacccaattcaattactattgaatgaattaagaattggttgccataaaaataaatcagttcatttaaaaaaaaaaaaaaaaaa

SEQ ID NO: 500 - DNA, 2572 bp, Homo sapiens
agcggactgccgcagccagagccgcagccaaagcctcagagagcaggagttggagcgcaggccctgctggatccgcgcctagctcgccgccaggcaccggccggaggacgggccgtggtgtcagctcactgcccgggcgctgtgggaggcagcgagcccgcgaccccccgggccgggcaccgccaggcgcggagcccagatcgcccccctgccaggcctggtcacggccagagcacgcaggagttcccagggtctggatctgcgcgcaccctaatgacctggggactgaagagaaaaaaggaacgaggatttcatctaaaagcataacgtgggcactaggcgaggaggaaagtggagaccacctggcacggggcagaggtgcctggagcccacgcttgagcatcggagaccctggcatcctagcagccgcgaccttggctctgccctgtctgagctggaaacacagcttagcttctagacatcgctggcacaggcctggcacaagtaagcagtgtcctcacctgtctgaaacgggacacggggtcggaggaaccaggatctagcctggccccaagcggaactctctggtggcccagaggtcgtcactggggagcccgcctcctgccctagcctcactggtgcggatgtgccgctgcccgccggagcaccatgatggcaggatgacctcagccgaagtaggagcagcagctggtggtgctcaggcggctgggccccccgagtggccccctggcagccctcaggccctccggcagcctggccgggcccgagtggccatggcagcactggtgtggctgctggcgggagccagcatgtcaagcctcaacaagtggatcttcacagtgcacggctttgggcggcccctgctgctgtcggccctgcacatgctggtggcagccctggcatgccaccggggggcacggcgccccatgccaggcggcactcgctgccgagtcctactgctcagtctcacctttggcacgtccatggcctgcggcaacgtgggcctaagggctgtgcccctggacctggcacaactggttactaccaccacacctctgttcaccctggccctgtcggcgctgctgctgggccgccgccaccacccacttcagttggccgccatgggtccgctctgcctgggggccgcctgcagcctggctggagagttccggacaccccctaccggctgtggcttcctgctcgcagccacctgcctccgcggactcaagtcggttcagcaaagtgccctgctgcaggaggagaggctggacgcggtgaccctgctttacgccacctcgctgcccagcttctgcctgctggcgggtgcagccctggtgctggaggctggcgttgccccaccgcccactgctggcgactctcgcctctgggcctgcatcctgctcagctgcctcctgtctgttctctataacctggccagcttctccctgctggccctcacctctgccctcaccgtccacgtcctgggcaacctcaccgtggtgggcaacctcatcctgtcccggctgttgtttggcagccgcctcagtgccctcagctacgtgggcatcgcactcactctttcaggaatgttcctttaccacaactgcgagttcgtggcctcctgggctgcccgtcgggggctgtggcggagggaccagcccagcaagggtctttgagacctgggggatctcaggagccacctgggatggccctggcctgaatccagcctccgctgtggccatagaaggaatggagaacagggctgggcatggtggctcacgcctataatcccagcacttccagagtccgaggtgggtggatcacctgaggccaggagttcgagaccagcctggctaacatggcaaaacctcatctctactaaaaatagaaaaattagctgggcatggtggcgcgtgcctatagtcccagctacatgggaggctaaggtgggaggatcacttgagccctgagatcgaggctgcagtaagccaagatcgcatgctactgcactccagcctgggagacagagcgagacgctgtctcaattaaaaaaaaaaaaaagtggagaactggcagtgacctctactgggggccatggcagggaggggagccttctggaagggctgccttggagattggaatggggactcccagggagacctgcgttccatccctgcctgcctcacccctgccacagactctgcacaccactggatggtgggtccaagcctggcacagtccctgtgcttgtcagagtcattattatgattaatatcaattacgatgccaaaaattgctgggcaaactttgaagacctcaacttgttacaatgacgatgatgatgattcttggcggttacacaatccttcctcctgggggggaggcagctaggaggcccagcaggggggcttctatgctgctgggctcccctagggagttggggtagtctgtgccaactccaggcagctgctgtggcctcacccctgggccccccaattttgggtcatccatcctcaaatacactatttttgcttgtaaaaaaaaaaaaaaa

SEQ ID NO: 501 - DNA, 4498 bp, Homo sapiens
agaggccgccggggccgtggatggggagggcgcgccgcccggcggtcccagcgcacaggcggccacgatgagggtcaacgagaagtactcgacgctcccggccgaggaccgcagcgtccacatcatcaacatctgcgccatcgaggacatcggctacctgccgtccgagggcacgctgctgaactccttatctgtggaccctgatgccgagtgcaagtatggcctgtacttcagggacggccggcgcaaggtggactacatcctggtgtaccatcacaagaggccctcgggcaaccggaccctggtcaggagggtgcagcacagcgacaccccctctggggctcgcagcgtcaagcaggaccaccccctgccgggcaagggggcgtcgctggatgcaggctcgggggagcccccgatggactaccacgaggatgacaagcgcttccgcagggaggagtacgagggcaacctcctggaggcgggcctggagctggagcgggacgaggacactaaaatccacggagtcgggtttgtgaaaatccatgccccctggaacgtgctgtgcagagaggccgagtttctgaaactgaagatgccgacgaagaagatgtaccacattaatgagacccgtggcctcctgaaaaaaatcaactctgtgctccagaaaatcacagatcccatccagcccaaagtggctgagcacaggccccagaccatgaagagactctcctatcccttctcccgggagaagcagcatctatttgacttgtctgataaggattcctttttcgacagcaaaacccggagcacgattgtctatgagatcttgaagagaacgacgtgtacaaaggccaagtacagcatgggcatcacgagcctgctggccaatggtgtgtacgcggctgcatacccactgcacgatggagactacaacggtgaaaacgtcgagttcaacgacagaaaactcctgtacgaagagtgggcacgctatggagttttctataagtaccagcccatcgacctggtcaggaagtattttggggagaagatcggcctgtacttcgcctggctgggcgtgtacacccagatgctcatccctgcctccatcgtgggaatcattgtcttcctgtacggatgcgccaccatggatgaaaacatccccagcatggagatgtgtgaccagagacacaatatcaccatgtgcccgctttgcgacaagacctgcagctactggaagatgagctcagcctgcgccacggcccgcgccagccacctcttcgacaaccccgccacggtcttcttctctgtcttcatggccctctgggctgccaccttcatggagcactggaagcggaaacagatgcgactcaactaccgctgggacctcacgggctttgaagaggaagaggaggctgtcaaggatcatcctagagctgaatacgaagccagagtcttggagaagtctctgaagaaagagtccagaaacaaagagactgacaaagtgaagctgacatggagagatcggttcccagcctacctcactaacttggtctccatcatcttcatgattgcagtgacgtttgccatcgtcctcggcgtcatcatctacagaatctccatggccgccgccttggccatgaactcctccccctccgtgcggtccaacatccgggtcacagtcacagccaccgcagtcatcatcaacctagtggtcatcatcctcctggacgaggtgtatggctgcatagcccgatggctcaccaagatcgaggtcccaaagacggagaaaagctttgaggagaggctgatcttcaaggctttcctgctgaagtttgtgaattcctacacccccatcttttacgtggcgttcttcaaaggccggtttgttggacgcccgggcgactacgtgtacattttccgttccttccgaatggaagagtgtgcgccagggggctgcctgatggagctatgcatccagctcagcatcatcatgctggggaaacagctgatccagaacaacctgttcgagatcggcatcccgaagatgaagaagctcatccgctacctgaagctgaagcagcagagcccccctgaccacgaggagtgtgtgaagaggaaacagcggtacgaggtggattacaacctggagcccttcgcgggcctcaccccagagtacatggaaatgatcatccagtttggcttcgtcaccctgtttgtcgcctccttccccctggccccactgtttgcgctgctgaacaacatcatcgagatccgcctggacgccaaaaagtttgtcactgagctccgaaggccggtagctgtcagagccaaagacatcggaatctggtacaatatcctcagaggcattgggaagcttgctgtcatcatcaatgccttcgtgatctccttcacgtctgacttcatcccgcgcctggtgtacctctacatgtacagtaagaacgggaccatgcacggcttcgtcaaccacaccctctcctccttcaacgtcagtgacttccagaacggcacggcccccaatgaccccctggacctgggctacgaggtgcagatctgcaggtataaagactaccgagagccgccgtggtcggaaaacaagtacgacatctccaaggacttctgggccgtcctggcagcccggctggcgtttgtcatcgtcttccagaacctggtcatgttcatgagcgactttgtggactgggtcatcccggacatccccaaggacatcagccagcagatccacaaggagaaggtgctcatggtggagctgttcatgcgggaggagcaagacaagcagcagctgctggaaacctggatggagaaggagcggcagaaggacgagccgccgtgcaaccaccacaacaccaaagcctgcccagacagcctcggcagcccagcccccagccatgcctaccacgggggcgtcctgtagctatgccagcggggctgggcaggccagccgggcatcctgaccgatgggcaccctctcccagggcaggcggcttcccgctcccaccagggcccggtgggtcctgggttttctgcaaacatggaggaccactttctgataggacattttcctttcttctttctgttttctttcccttgtttttgcacaaagccattatgcagggaatattttttaatctgtagtattcaagatgaatcaaaatgatggctggtaatacggcaataaggtagcaaaggcaggtgctttgcagaaagaatgcttggaaacttgagtctccctagaggtgaaaagtgagcagaggcccctagaaaccctcctctgaatcctcctaattccttaagatagatgcaaaatggtaagccgaggcatcgcgcaaaagctggtgcgatgcttcagggaaaatggaaaacccacgcaagaataatgattgattccggttccaaaaggtgtcacctacctgtttcagaaaagttagactttccatcgccttttccttccatcagttgagtggctgagagagaagtgcctcatccctgagccacacagggggcgtgggagcatcccagttatccctggaaagctagaaggggacagaggtgtccctgattaagcaggaaacagcacccttggcgtccccagcaggctccccactgtcagccacacacctgcccccatcacaccaagccgacctcagagttgttcatcttccttatgggacaaaaccggttgaccagaaaatgggcagagagagatgacctcggaagcatttccacagatggtgtcagggtttcaagaagtcttagggcttccaggggtcccctggaagctttagaatatttatgggtttttttttcaaatatcaattatatggtagattgaggattttttttctgtagctcaaaggtggagggagtttattagttaaccaaatatcgttgagaggaatttaaaatactgttactaccaaagatttttattaataaaggcttatattttggtaacacttctctatatttttactcacaggaatgtcactgttggacaattattttaaaagtgtataaaaccaagtctcataaatgatatgagtgatctaaatttgcagcaatgatactaaacaactctctgaaatttctcaagcaccaagagaaacatcattttagcaaaggccaggaggaaaaatagaaataaatttgtcttgaagatctcattgatgtgatgttacattccctttaatctgccaactgtggtcaaagttcataggtgtcgtacatttccattatttgctaaaatcatgcaatctgatgcttctcttttctcttgtacagtaagtagtttgaagtgggttttgtatataaatactgtattaaaaattaggcaattaccaaaaatccttttatggaaaccatttttttaaaaagtgaatgtacacaaatccacagaggactgtggctggacattcatctaaataaatttgaatatacgaaaaaaaaaaaaaaaaaaaaaaaa

SEQ ID NO: 502 - DNA, 7367 bp, Homo sapiens
atagctctgtcggcgccgcggtgtccacctcagtcaggccacggtggaagacgcgtgccgcggcgcctggttgcctgcagcggcccggacccgagaggaagctgaaccatctatctccagaaatgtcttcagaaagtaaagagcaacataacgtttcacccagagactcagctgaaggaaatgacagttatccatctgggatccatctggaacttcaaagggaatcaagtactgacttcaagcaatttgagaccaatgatcaatgcagaccttatcataggatccttattgagcgtcaagagaaatcagatacaaacttcaaggagtttgttattaaaaagctgcagaagaattgccagtgcagtccagccaaagccaaaaatatgattttaggtttccttcctgttttgcagtggctcccaaaatacgacctaaagaaaaacattttaggggatgtgatgtcaggcttgattgtgggcatattattggtgccccagtccattgcttattccctgctggctggccaagaacctgtctatggtctgtacacatctttttttgccagcatcatttattttctcttgggtacctcccgtcacatctctgtgggcatttttggagtactgtgccttatgattggtgagacagttgaccgagaactacagaaagctggctatgacaatgcccatagtgctccttccttaggaatggtttcaaatgggagcacattattaaatcatacatcagacaggatatgtgacaaaagttgctatgcaattatggttggcagcactgtaacctttatagctggagtttatcaggtagcgatgggcttctttcaagtgggttttgtttctgtctacctctcagatgccttgctgagtggatttgtcactggtgcctccttcactattcttacatctcaggccaagtatcttcttgggctcaaccttcctcggactaatggtgtgggctcactcatcactacctggatacatgtcttcagaaacatccataagaccaatctctgtgatcttatcaccagccttttgtgccttttggttcttttgccaaccaaagaactcaatgaacacttcaaatccaagcttaaggcaccgattcctattgaacttgttgttgttgtagcagccacattagcctctcattttggaaaactacatgaaaattataattctagtattgctggacatattcccactgggtttatgccacccaaagtaccagaatggaacctaattcctagtgtggctgtagatgcaatagctatttccatcattggttttgctatcactgtatcactttctgagatgtttgccaagaaacatggttacacagtcaaagcaaaccaggaaatgtatgccattggcttttgtaatatcatcccttccttcttccactgttttactactagtgcagctcttgcaaagacattggttaaagaatcaacaggctgccatactcagctttctggtgtggtaacagccctggttcttttgttggtcctcctagtaatagctcctttgttctattcccttcaaaaaagtgtccttggtgtgatcacaattgtaaatctacggggagcccttcgtaaatttagggatcttcccaaaatgtggagtattagtagaatggatacagttatctggtttgttactatgctgtcctctgcactgctaagtactgaaataggcctacttgttggggtttgtttttctatattttgtgtcatcctccgcactcagaagccaaagagttcactgcttggcttggtggaagagtctgaggtctttgaatctgtgtctgcttacaagaaccttcagactaagccaggcatcaagattttccgctttgtagcccctctctactacataaacaaagaatgctttaaatctgctttatacaaacaaactgtcaacccaatcttaataaaggtggcttggaagaaggcagcaaagagaaagatcaaagaaaaagtagtgactcttggtggaatccaggatgaaatgtcagtgcaactttcccatgatcccttggagctgcatactatagtgattgactgcagtgcaattcaatttttagatacagcagggatccacacactgaaagaagttcgcagagattatgaagccattggaatccaggttctgctggctcagtgcaatcccactgtgagggattccctaaccaacggagaatattgcaaaaaggaagaagaaaaccttctcttctatagtgtgtatgaagcgatggcttttgcagaagtatctaaaaatcagaaaggagtatgtgttcccaatggtctgagtcttagtagtgattaattgagaaggtagatagaagaatgtctagccaataggttaaaatttcaagtgtccaacatttcccagttccacagtgggaaattttgcacacttgaaattttaaccaagtggctagatattattcctcctttgaagctaatggcatttgtatatacacactgcagcagagcttgtagctggacagagtcaaaaagaagaaaatacggtttcaggctttcttgcagatatgaagtattcttggaatgcaataagtatgtattgaactgtactgtaaagtagctccaaaacttaattactctcctgttttaggggttatacatttggactgtgcattctccaagagatgaagcggtgaagttgggatttacattggaagtgctgtagacttctttatgtggctcagtggagagagggaaagaatgttgcacctgctctagtaccataggtcaagaggcttctggatcacaaagtcataactagacaggtttgttcttgtagttttctatccccagtctttgctccccagatggcagtagtttttagtaggaaagtgccattcctgtccttaaggcacagtctcatcagaagtctaatacctgggcaggtttataacatcctgagagccagcctgacattagacagaataccctttgtaatacattggaaatttttactcatgcctttttgtttaggataaataggtaagcacaaagagctcttcaaaatcagaaaaaacaataggagtccttccttgtcttttctgtgatctctgtccttgtttctgagactttctctaccattaagctctattttagctttcagttattctagtttgtttcccatggaatctgtcctaaactggtgtttttgtcagtgacagtcttgccagtcagcaatttctaacagcattttaaatgagtttgatgtacagtaaatattgatgacaatgacagcttttaactcttcaagtcacctaaagctattatgcaggaggatttagaagtcacattcataaaacccaagtgctatgggtgtattattcatgatagctggcccacaggtcatgaattgaggaggaatttgctttcaaaaagcaagaatgtccaacactgaaagtttatagttttatatttggaccttgaaaggtaagaaaaaaccaggttctccaaagttaggaatagggaactaatttatgaaacagccatcttaaaaaaaaaaaaagtaaactgcaaaagtacaaaatcatttttcaatctgttcccagtttctaaacaattttaaatatttatgagaagcaaaccctatgtgtagggcatctgttggagtgggatgcttttagacatatattaagtatgtacatgtttaatatgtatatttaaaatgcatatatattttattatatctatattatcctatatagatatatgtaacttagctttattgttagctccataagctgccagtgttgcttttctgttggtagagctctcccatttggtgacatggaaaatacctttccattatcacaacaaagcagttgctcagtagaaagtctagatttctgtcttataggtgatttctgtcttataggtgattataatcaagtgtaggcttcctgaattttgacatccttttagaacttgggtctggaattccagaaatgttaattgctgcttgtatttgttcttgtttgttttttagccagtatttgccctttctatccagccttatgaataatagcagtaaaatcacagtatcttggtcagtctttatttttttccttttttcttttttaagagacagtcatccaggccagagtgcagtttgatgatagcttactgaagcttcccactcctgggctcaagttatccttccattttggcctcctgagtagctagaccataggtatgcatcaccacaccctgctaattttttaaatttttttctagagagagggtctcactgtgttgcccaggctggtctcaaactccaggctcaagcaatccttcactcatgcctgtaatcccagcacgttgggaggccgaggcgggtggatcacctgaagtcaggagttcgagaccatcctggctaacactgtgaaaccccgtctctactaaaaatacaaaaaattagcggggcatggtggcacgcgcctgtagtcccagctactcaggaggctgaggcaggagaattacttgaacccgggaggcggaggttgcagtaagcagagattgtgccactggactccagcctgggtgacagagcgagactccgtctcaaacaaacaaacaaaaaactgttttcatttgctctcttgaccaaaggataggactttagttctttaagcattattttaaacactatattgatacaaaaatatcttgcttactctaaactttagagtctaaatgaagctttttctcagtacaagattctgagtatcataaaatggttatttaattgaaacgtagtgtggtatactcttgatggttagaactcttacagccttatttatttttaagtttgttacagccaaagggttggagtgtgccagtgcacaggtagactaaggaaaacattatagaggagtgaagagaacagaccattgaaaagactattatctgaccagcggaggcagaaaagagaggaacccagttgaataggatccaatccctggttagcctctacacaataatagggagacaaggattaggagccatacctcccagagcaaggtatctttctagagcaaatttctctttctagaaggggagggtcacagggtcacagattcaccaaagctgaaagggctgaggagctcatggtagcctgggttgacctactctggagcacggtgtcttccttctaaactgagtgactgtagtactatctgtgcctctgatggtaataaaactgacaagatgtctaatttttttttaagtaggaccaaaggaaaacaagatttagatagtctgactttgcttttgaacaacagacattgcaagtcaaaattgttgtcaaatttacatatggtaaatgatgaactttaaaaatgtgtccaggtgttagatgagttcattagactcttttaatgctaatggctagtacgtttaaacaaaacagcagttctctgctgcaatattcccattgaccacttaaatgaccataagtggtcatttaagaacatgttagggttagccctgatctgaatataaaagtgagaaaagggctacagtgcatttcttggtaacttaaactgagtcttgaagttataatgatccattcgagttctgtgatccttattgttcttaattgtgtttctctacgtattgttacagatgagccatacgtttctttgtatcaatgtagacatgacttcagatacctctgaggacctacccagcagtctaggaccctgggccaagtgctgggactatggtactaaatccagtagatgggctgtgtagcaactctcccagggaacacactagggtacttagggaggtgctttgtggagcatgttgaagctttgagatctgagcaggaggcagtgatgtccctggtctattcagggaaagatttcagtgtgaaatggtaaacatccaattgacaggatttagattttgcttagtttttctgctttttaatgtttctatcccccatctcagtgttttctttatccatcccagtgatgccttatttgaaactgggcttaaactgcaaaaagaatgaagttggatttaggaagctgttagatcattgagtggtgttgagagtgaagtttcactagcagggaagtttccttgagcctaaaataaaaagaaaaaattaaaaagaatcagtttttttaattaaaaaaatagaaagctgttaggctcctaattcgtggggtttttttttgtaaaaacagtttagataatcctgaatgcaatcattaacttggttgctaattacaagaatgaaaattataatggaaaaggacaaaataatataccagctggtttgttattatagtccgtgtattaaaatactattgaaatacgttaaaggtaaatttttaaggtttaaaaaaaatttagtaacttacagggatggagaatttagatgtcagaggtggggagatttatttttataaggtaatttttatcctgataaggacttaaaaaaaagttttgcaactgaaattttaaagtaaacatgttaagtacagttaaaaagtaagcattgtagtaaatagtggattctctggtgtgtattttttatctcagtgttgaaaattggaaaagaatggactgaagtctaaaaactggaataatgaaggacactaaatgcctttattgtagatactatgtttgtaagtctatagctaagcaacttaagccaaaaaggtctttcaactgaagctttaatcaacttattttggagatgttctcttcccttatctcatgcgtcatccctaaaataataagatacatgggatcaaatagcccttgccttttcaacacaaatcagttggaaaattatggtttgagtcctgttgctgccatggcttctgtttctcagaaatgagtgtgtatgaacataccaatctatgtaataggctacctttttttgtcttctttggaactttgtacacaaaccaagacaatatcagggtgacaggtgaatgaacttaaattctcagtcttgtctattcaccaaaaaagtatactgcctgttttttctttaattattcaaggttgatgacttttaggaacatgttttatactgtattttttaattaaagcaagtgccttgatgtaattccatgtaaatcattgcttaaccctcttatgggatgaggatgagttattaatgtattgcagcctactggaaaggagggggagttggttaatagcagatacttttcttctagaagcttatgttttatgctgtttattatgtaagatcctgtatgtgtgttgagatttagaggtttcatttgttttgtctgctaataaattgttactctaataataaaaaaaa

SEQ ID NO: 503 - DNA, 1924 bp, Homo sapiens
ccccgccttcacccactgcctctgcctccctggggcagagctgtttcccagacgggtggggcggggcccaactgtcccagctccttcagccctttctgtccctcccagtgaggccagctgcggtgaagagggtgctctcttgcctggcgttccctctgcacggctgccccctcccaccctgcccactaagccagacccactgtcgccattcccacttctggtcctgccacctcctgagctgccttcccgcctggtctgggtagagtcatggcctcgagcacaggtgaccggagccaggcggtgaggcatggactgagggcgaaggtgctgacgctggacggcatgaacccgcgtgtgcggagagtggagtacgcagtgcgtggccccatagtgcagcgagccttggagctggagcaggagctgcgccagggtgtgaagaagcctttcaccgaggtcatccgtgccaacatcggggacgcacaggctatggggcagaggcccatcaccttcctgcgccaggtcttggccctctgtgttaaccctgatcttctgagcagccccaacttccctgacgatgccaagaaaagggcggagcgcatcttgcaggcgtgtgggggccacagtctgggggcctacagcgtcagctccggcatccagctgatccgggaggacgtggcgcggtacattgagaggcgtgacggaggcatccctgcggaccccaacaacgtcttcctgtccacaggggccagcgatgccatcgtgacggtgctgaagctgctggtggccggcgagggccacacacgcacgggtgtgctcatccccatcccccagtacccactctactcggccacgctggcagagctgggcgcagtgcaggtggattactacctggacgaggagcgtgcctgggcgctggacgtggccgagcttcaccgtgcactgggccaggcgcgtgaccactgccgccctcgtgcgctctgtgtcatcaaccctggcaaccccaccgggcaggtgcagacccgcgagtgcatcgaggccgtgatccgcttcgccttcgaagagcggctctttctgctggcggacgaggtgtaccaggacaacgtgtacgccgcgggttcgcagttccactcattcaagaaggtgctcatggagatggggccgccctacgccgggcagcaggagcttgcctccttccactccacctccaagggctacatgggcgagtgcgggttccgcggcggctatgtggaggtggtgaacatggacgctgcagtgcagcagcagatgctgaagctgatgagtgtgcggctgtgcccgccggtgccaggacaggccctgctggacctggtggtcagcccgcccgcgcccaccgacccctcctttgcgcagttccaggctgagaagcaggcagtgctggcagagctggcggccaaggccaagctcaccgagcaggtcttcaatgaggctcctggcatcagctgcaacccagtgcagggcgccatgtactccttcccgcgcgtgcagctgcccccgcgggcggtggagcgcgctcaggagctgggcctggcccccgatatgttcttctgcctgcgcctcctggaggagaccggcatctgcgtggtgccagggagcggctttgggcagcgggaaggcacctaccacttccggatgaccattctgccccccttggagaaactgcggctgctgctggagaagctgagcaggttccatgccaagttcaccctcgagtactcctgagcaccccagctggggccaggctgggtcgccctggactgtgtgctcaggagccctgggaggctctggagcccactgtacttgctcttgatgcctggcggggtggggtggggggggtgctgggcccctgcctctctgcaggtccctaataaagctgtgtggcagtctg

SEQ ID NO: 504 - DNA, 6666 bp, Homo sapiens
gcctgccggctgcagacgcctgcgagcaggttgtttttataagaggcgtcattggcgcccgagctgtgaccgccgccactggggcagccagcacaatcgggcggaggtggcgctgccccttcagacctgaaagatgtctgaaaattccagtgacagtgattcatcttgtggttggactgtcatcagtcatgaggggtcagatatagaaatgttgaattctgtgacccccactgacagctgtgagcccgccccagaatgttcatctttagagcaagaggagcttcaagcattgcagatagagcaaggagaaagcagccaaaatggcacagtgcttatggaagaaactgcttatccagctttggaggaaaccagctcaacaattgaggcagaggaacaaaagatacccgaagacagtatctatattggaactgccagtgatgattctgatattgttacccttgagccacctaagttagaagaaattggaaatcaagaagttgtcattgttgaagaagcacagagttcagaagactttaacatgggctcttcctctagcagccagtatactttctgtcagccagaaactgtattttcatctcagcctagtgacgatgaatcaagtagtgatgaaaccagtaatcagcccagtcctgcctttagacgacgccgtgctaggaagaagaccgtttctgcttcagaatctgaagaccggctagttgctgaacaagaaactgaaccttctaaggagttgagtaaacgtcagttcagtagtggtctcaataagtgtgttatacttgctttggtgattgcaatcagcatgggatttggccatttctatggcacaattcagattcagaagcgtcaacagttagtcagaaagatacatgaagatgaattgaatgatatgaaggattatctttcccagtgtcaacaggaacaagaatcttttatagattataagtcattgaaagaaaatcttgcaaggtgttggacacttactgaagcagagaagatgtcctttgaaactcagaaaacgaaccttgctacagaaaatcagtatttaagagtatccttggagaaggaagaaaaagccttatcctcattacaggaagagttaaacaaactaagagaacagattagaatattggaagataaagggacaagtactgaattagttaaagaaaatcagaaacttaagcagcatttggaagaggaaaagcagaaaaaacacagctttcttagtcaaagggagactctgttgacagaagcaaagatgctaaagagagaactggagagagaacgactagtaactacggctttaaggggggaactccagcagttaagtggtagtcagttacatggcaagtcagattctcccaatgtatatactgaaaaaaaggaaatagcaatcttacgggaaagactcactgagctggaacggaagctaaccttcgaacagcagcgttctgatttgtgggaaagattgtatgttgaggcaaaagatcaaaatggaaaacaaggaacagatggaaaaaagaaagggggcagaggaagccacagggctaaaaataagtcaaaggaaacatttttgggttcagttaaggaaacatttgatgccatgaagaattctaccaaggagtttgtaaggcatcataaagagaaaattaagcaggctaaagaagctgtgaaggaaaatctgaaaaaattctcagattcagttaaatccactttcagacactttaaagataccaccaagaatatctttgatgaaaagggtaataaaagatttggtgctacaaaagaagcagctgaaaaaccaagaacagtttttagtgactatttacatccacagtataaggcacctacagaaaaccatcataatagaggccctactatgcaaaatgatggaaggaaagaaaagccagttcactttaaagaattcagaaaaaatacaaattcaaagaaatgcagtcctgggcatgattgtagagaaaattctcattctttcagaaaggcttgttctggtgtatttgattgtgctcaacaagagtccatgagcctttttaacacagtggtgaatcctataaggatggatgaatttagacagataattcaaaggtacatgttaaaagaactggatactttttgtcactggaacgaacttgatcagttcatcaataagtttttcctaaacggtgtctttatacatgatcagaagctcttcactgactttgttaatgatgttaaagattatcttagaaacatgaaggaatatgaagtagataatgatggagtatttgagaagttggatgaatatatatatagacacttctttggtcacactttttcccctccatatggacccaggtcggtttacataaaaccgtgtcattacagtagtttgtaacatttgtagattggatagcatttttatgatttgatgagtttcttgtaaggttaccgtttctaagagttgtgctttatggccactgagagaattcagaataaattgaaagatggagtctaaaaattattagctgttacaaatggaacatttcattataacgtgatcactttgacttgagcaaatggtttaatttttatcttaaaaatcagttaagaatatataaaatcctactttggccaagtttgtttcttttcattatagtttatatgaaaagatcaccttaagtgaaattattttcctttaatcttttatgtatttattcacttttggaagctaggaatgagcaacacaaattttactctgaagtcagaagagctcatatataataattctaatgtcccacctattttcacttgtccattccatgtaccagcttagttatgatacttagtcacataattatctttgataaaggtagaggcacaaagaggcaaactaagcaagtcaaattctaatgtgtgtacttcataataattttttatccattttcatctttatattctgtaacatgaaacttacctaatcttcaaatgttagcttcattttttacctttgaaatacttaatctttctgaataaatataatgtgtctataaaataatgagactgattctggtgtctttagtcattaagctggtatctagtcctataatgaacaaaggtgaagctgccttgaggagacaagtgaaaaatttttgcttcaaaggagctcacaagctaagtaaataaatgaaattaaggtatggggcatggtggcctcaggctgtctggaggtgtttggaaaggcttcttgagtgaggtggcctttgaactgaacttagtttttaaagtagcttttggaagagaaatgaggatttgctatgcagacagggaagggaatttcacttaaaaggaaggtcatttggagatgtgaagatacactgctttaaggaagcagggtagagctggaggataagagatgcagaccatgaagggccccattttatgctaaaggttttgtcctgtaggacatggagaacttctgaagaattttcaaggcgggtgggataagattatattgtattttagattacagtagtccccccttatcttcaggatatatgttccaagacccccagtggatgctggaaaccagggatagaacataattctatatatactatgcatgaatttctttttccttctttacaatctcacacataggtttgttcttactatagatcttaccaatctcagcatacttttatttctcttgagaaccttcaccctttcacttaaaggaggcgctttatagcttctctttggcatatccaaatgccagcatcactgttgtattttggggtcattattaagttacttaatcatccttaatccttatcttagggatacttgaacacaaacactgtggtaggataacagtatatctgattaacagactgctactaggtgattaatgggtgggtagtgtaaatacacaagaaaaggatgattcacatcccatgtgggatggagcagaactgcattatttcattacattactcagaacaggcatataattgaaaacttatgaattatttttttttaattatttgagatggaatcttgctttgtcagccaggctggagtgcagtgacacgatctcagctcactgcaacctctgtctcctgggttcaggtgattctcctccctagtctcccaagtagctgggactataggcacgtgccaccacacccggctaattttcatatttttagtagagatggggtttcaccatgttggccaggctgttcttgaaatcctgacctcaagtgatccacacatgtctacctcccaaagtgctgggattacagtcgtgagccactgtaccccgcctaaaactgatgaattatttctgaaattttctatttaacattttcagaccacagttgaccacaggtaacggaaacctcaatcacagaaagtaaagccgtggatacggtgggactaatgtattggtagcagcctagaggattgatgggaaaggtatgaagctagaaggtggtcaatataatacagacatgagctgatgaacatctaaactgggactatactagtaggagaggaaaggaaaaaacatttggaaaatagtaacattgatatttcttgtgaaggagaagtagaaagtaacagtgacttctagatttctgggttgggtcatcttgttggatagtagtaccactgagatagggaattcaaggtttggggcaagggtaattggagatgagaattgtgtttggaggtaactactgacattcaagtggagagggttagttggcagttagttctatggtcatctcttttgccgagactgtatatttatcagactcctgggagaacaccaacatccatggggttgtagggaaggctaaggacaggagtggggagtggtaccttgaaaatccaaaagccatctcaagtaaaaggaataaatgtgtcatgctttttaaaaagttgatgtgcggaaaatgttttcttggcttggaaactgggcggccaggggatgacagtatggacttccagtgaagtagtgacggaagcctgatcatagacattaaggaaagcggtgtaggtgttgtgagcttttgctgtaagaaaaagttgagacttttgttttgctttgtttgtgagagatgtgtatgtatttctgctgagtgataaagccagcggggagggactgatttttataggaaaggaggaaaaataatggaaacacatctcattattttattgtcacatttcttttctttgttatcttttgagtgtttcccttttttgccagtagagttattgtctattttttctttctataggacaaaaaaactaatacagactcctttatttttatatggatatactaggattgtaattcagatatttaatatcttttatcagtgttcagatcatagattaatggagaaaacatttaaaattgttttaaatttaaatacattgaactctaacatagatgaaaaatgtgtttactgctttcagtcgacctgataaaaagcaacgtatggtaaatattgaaaactccaggcatcgaaaacaagagcagaagcaccttcagccacagccttataaaagggaaggtaaatggcataaatatggtcgcactaatggaagacaaatggcaaatcttgaaatagaattggggcaattaccttttgatcctcaatactgattcacaattgagttaaattagacaactgtaagagaaaaatttatgctttgtataatgtttggtattgaaactaatgaaattaccaagatgacaatgtcttttcttttgtttctaagtatcagtttgataactttatattattcctcagaagcattagttaaaagtctactaacctgcattttcctgtagtttagcttcgttgaattttttttgacactggaaatgttcaactgtagttttattaaggaagccaggcatgcaacagattttgtgcatgaaatgagacttcctttcagtgtaagagcttaaagcaagctcagtcatacatgacaaagtgtaattaacactgatgtttgtgttaaatttgcagcagagcttgagaaaagtacattgttctggaatttcatcattaacattttataatcttacactcacttcttgtctttttgtgggttcaagagccctctgacttgtgaagaatttgctgccctcttaagagcttgctgacttgttttcttgtgaaattttttgcacatctgaatatcgtggaagaaacaataaaactacaccatgaggaaaactaaaggtctttatttaaaatctggcattgtattaacatgtaattttatactatgtggtattttatacatttcctcagtagtgatatttggtaaagcagttcatacagcttttttctaagttccatgaatcttacccagtgtttaccgaagtatttaagcagcatctgaatatttccacccagcaatgttaatttatctaggaaagttcagaatttcatcttcatgttgaatttcccttttaacttccgttcatagacatatatgtgacttccaattcgaccctctggcaagtgagtgtggaagaaaacagcagttcttttataattgcttgaaattaggaaagcgcttatttcctagaagcaaataaatgtttaagtaaataaaggctacattttgctg

SEQ ID NO: 505 - DNA, 5463 bp, Homo sapiens
tggtgtttggcaaggagtacacagtgggaaccaaggccatgtacagctgcagtgaaggctaccacctccaggcaggcgctgaggccactgcagagtgtctggacacaggcctatggagcaaccgcaatgtcccaccacagtgtgtccctgtgacttgtcctgatgtcagtagcatcagcgtggagcatggccgatggaggcttatctttgagacacagtatcagttccaggcccagctgatgctcatctgtgaccctggctactactatactggccaaagggtcatccgctgtcaggccaatggcaaatggagcctcggggactctacgcccacctgccgaatcatctcctgtggagagctcccgattccccccaatggccaccgcatcggaacactgtctgtctacggggcaacagccatcttctcctgcaattccggatacacactggtgggctccagggtgcgtgagtgcatggccaatgggctctggagtggctctgaagtccgctgccttgctggacactgtgggactcctgagcccattgtcaacggacacatcaatggggagaactacagctaccggggcagtgtggtgtaccaatgcaatgctggcttccgcctgatcggcatgtctgtgcgcatctgccagcaggatcatcactggtcgggcaagacccctttctgtgtgctggtgtcctgtggccatccgggctccccgcctcactcccagatgtctggagacagttatactgtgggagcagtggtgcggtacagctgcatcggcaagcgtactctggtgggaaacagcacccgcatgtgtgggctggatggacactggactggctccctccctcactgctcaggaaccagcgtgggagtttgcggtgaccctgggatcccggctcatggcatccgtttgggggacagctttgatccaggcactgtgatgcgcttcagctgtgaagctggccacgtgctccggggatcgtcagagcgcacctgtcaagccaatggctcgtggagcggctcgcagcctgagtgtggagtgatctcttgtgggaaccctgggactccaagtaatgcccgagttgtgttcagtgatggcctggttttctccagctctatcgtctatgagtgccgggaaggatactacgccacaggcctgctcagccgtcactgctcggtcaatggtacctggacaggcagtgaccctgagtgcctcgtcataaactgtggtgaccctgggattccagccaatggccttcggctgggcaatgacttcaggtacaacaaaactgtgacatatcagtgtgtccctggctatatgatggagtcacatagagtatctgtgctgagctgcaccaaggaccggacatggaatggaaccaagcccgtctgcaaagctctcatgtgcaagccacctccgctcatccccaatgggaaggtggtggggtctgacttcatgtggggctcaagtgtgacttatgcctgcctggaggggtaccagctctccctgcccgcggtgttcacctgtgagggaaatgggtcctggaccggagagctgcctcagtgtttccctgtgttctgcggggatcctggtgtcccgtcccgtgggaggagagaggaccgaggcttctcctacaggtcatctgtctccttctcctgccatccccctctggtgctggtgggctctccacgcaggttttgccagtcagatgggacatggagtggcacccagcccagctgcatagatccgaccctgaccacgtgtgcggaccctggtgtgccacagtttgggatacagaacaattctcagggctaccaggttggaagcacagtcctcttccgttgtcaaaaaggctacctgcttcagggctccaccaccaggacctgcctcccaaacctgacctggagtggaaccccacctgactgtgtcccccaccactgcaggcagccagagacgccaacgcatgccaacgtcggggccctggatttgccctccatgggctacacgctcatctactcctgccaggagggcttctccctcaagggtggctccgagcaccgcacctgcaaggcggatggcagctggacaggcaagccgcccatctgcctggaggtccggcccaatgggagacccatcaacactgcccgggagccaccgctcacccaagccttgattcctggggatgtttttgccaagaattccctgtggaaaggggcctatgaataccaggggaagaagcagccagccatgctcagagtgactggcttccaagttgccaacagcaaggtcaatgccaccatgatcgaccacagtggcgtggagctgcacttggctggaacttacaagaaagaagattttcatctcctactccaggtgtaccagattacagggcctgtggagatctttatgaataagttcaaagatgatcactgggctttagatggccatgtctcgtcagagtcctccggagccaccttcatctaccaaggctctgtcaagggccaaggctttgggcagttcggctttcaaagactggacctcaggctgctggagtcagaccccgagtccattggccgccactttgcttccaacagcagctcagtggcagccgcgatcctggtgcctttcatcgccctcattattgcgggcttcgtgctctatctctacaagcacaggagaagacccaaagttcctttcaatggctatgctggccacgagaacaccaatgttcgggccacatttgagaacccaatgtacgaccgcaacatccagcccacagacatcatggccagcgaggcggagttcacagtcagcacagtgtgcacagcagtatagccacccggcctggccgccaccaccgccaccgagagccccgcctccagcagccgttccccagggggcaggaagtaggctcccctgagcacagtgcccagtgcccatcttcgttcgtctccttgcctgtgtctgctactgctgggactcaggccctcgccctgccgccatctatgccagttaccctggagaggactcctgccgtgtcctgaaaaggcagaaaaggaagaggggctgcagacagaggaagaaagtttatggatttaaaatagcaaagcaacttgtggatctgtgtgtgtgtgtgtgtgtgtgtgtatgggcctgatcacacacaaacacacacacctctccttcattcacgtcctatggaagagaccataaaggcttcaaaactagaagtgcgcatgaaggatgcttcatgccctgttccccacacagagaagagatgaagagggggaggtacggtcagctttcaaaacaatatgccccccgcccatcccatgtgtgaggacatggtgactcggtgactgtaacagtaggacacatcccatcatgcggtcagagtgcagaaacccggtcagcgtgcagaaaccagctgtctgctgatgaacggcccatctgcacagcggcagcaaggattaccccaagggcaggaaaaaagtctttggaaatagattgaaaatcagtttctttatttttttcaaacactgttttattgagttctaaacccagtggattaaaaagtcatttgggtcctgggaagcactgggaaagaagggagagccggggaggatagggcaggagtctggccaggagcccaaggtcaagtctggctgtcaactgacaaagagaagagaagacaagtctgtggcccagacagggtgccaagtctgggggcagcagcagggtccttgagagaacaggggagcaagcctgccccagtacccaaaaaacaatggctatcatgtactggggttattctctgtgcctgacactttacctatagtatttctagtctgcacaataacaccaaaatgtaggatttgttattcccctttgacagatgagaaaacagaagcctgcaaaggtaaagacagagttaggaagtgtggagtcagaatgcaaacccagatcagtctgccccaaagtccactacaccagctgccagaaaccctgttctagaaggggcagctaagaagggaggagccgatgaaactctacagtagcactgtggccaggtctggaaagccaggcaagacacctgtgtgtcctatctgggttctgctgtctccgcgtaggcagcttcggggcaaggattcaactccccaggcctcccacggttggtgctggctccttggctcccagcagccgctgaccatagccagcaaaagacctggcaggtcctgaatcaaaacaacagagtggctgaaagtcacacctctccagctccttgcgagtgggtttgattgattttgacagctatatcatgcttgggtcgttcatgaattccatgagaattgttgggaagttcatgagtttaggaatcaaagtatagcatttagggccactttctctgtcctcgggaaggcccccacaagcttaagcccctgtatacgtgtgacatgctggcctcagagattcatgtcacatattgaaatagcaaatagaaatgtgcaggagcggagggacagcgacacctggttcttaagcaaattctagattggaacaattagaagatctgactgatgttaagagtggccagaggaaagtgagaggcgtccatttccagcagacacaatggaggctgacagaggcaggagcctacccctggccacaccacctctgggacacggcacccccctgggcctggagggagagggccaatccagacacactcacactctcatctctttccttggctggaaacaagtgcaggaagctcccctcccaatttcttatgctcccttcccccttacactcctctccttcgactgctcccttcccccttcttatgcccctctcagaccacccagcggatgcctattcccgccccccacccctcccctgcgtctccttgtaaagttccatgagatgctcgaggagcacctgctggtggggcacccagcactctgctgggcatcaccctccgcacccctgacatttctctccacctccagaggcttggaagggaacagggcagatgaggcccttcacccaccatctacgccatatacccatcaccatcccatgaggaaaaaaaaaaaagtaaaacaaagacaaaaaaaatcttttgtacagagatatatttttattatacaaagtttgtacagtaccaaaaaagaaaaaaaaaaggtgtaaatttttttttcattattgtaggtaaacggtagtggaagccttttttgtaaatgtaataaaatgtataaatatggttttcagaaaacatcaagtgctgtaaatatgtaatctacacaccttcttggcttgtctgcagtatatacatttaatttatctgtctctgtatatgaggcttccccctggggtcctgcattatggtactttcctgaatttgaaagcaattttaaattttttgaattcaaataaaatataaatttttgcattg

SEQ ID NO: 506 - DNA, 2278 bp, Homo sapiens
acagccgctccctcgctctgctggggcctccggacgcgcttcccacgcgggtctctggaacactcggtccgaacgcacgcctgcttgcactcacactgcggttcacacccggaggcgctctcgcactcacactgccgctcacgcgtgctcacactcccccacgcgcgctccgctccggctccagccccgcgcccagcgaaggcgcaggcactgctgccgagagcgccgaggggccccgcggccttcccatggcggacctgagcttcatcgaagataccgtcgccttccccgagaaggaagaggatgaggaggaagaagaggagggtgtggagtggggctacgaggaaggtgttgagtggggtctggtgtttcctgatgctaatggggaataccagtctcctattaacctaaactcaagagaggctaggtatgacccctcgctgttggatgtccgcctctccccaaattatgtggtgtgccgagactgtgaagtcaccaatgatggacataccattcaggttatcctgaagtcaaaatcagttctttcgggaggaccattgcctcaagggcatgaatttgaactgtacgaagtgagatttcactggggaagagaaaaccagcgtggttctgagcacacggttaatttcaaagcttttcccatggagctccatctgatccactggaactccactctgtttggcagcattgatgaggctgtggggaagccgcacggaatcgccatcattgctctgtttgttcagataggaaaggaacatgttggcttgaaggctgtgactgaaatcctccaagatattcagtataaggggaagtccaaaacaataccttgctttaatcctaacactttattaccagaccctctgctgcgggattactgggtgtatgaaggctctctcaccatcccaccttgcagtgaaggtgtcacctggatattattccgataccctttaactatatcccagctacagatagaagaatttcgaaggctgaggacacatgttaagggggcagaacttgtggaaggctgtgatgggattttgggagacaactttcggcccactcagcctcttagtgacagagtcattagagctgcatttcagtagccaaagaggacaggaacaagtctgtcttcatgagggaggaagacaatggtcctataatgcccttggataagaaaaggaaacttttgagctgcaccttcagtttatcctcaaagcctgcgttgtttgtcttcatctaatccagctttgatggacatctgtgatggttgcctgtacacttgctgaaatgaaatattagaaatggctgtatattccaaagaaaccctatattatatatccacattactgctgctaggattcatagttgcacatactgtttattgcttatgtgtagaaggaatgaaactagtttccagagttgttattaatatgaatatatatcatgtgttaatattgagaaaggaaaaatacattcccggtgttagtagttcttcatttcctgtctccaacagaaaattcactcattttagaactagtgtaattcttgataataaaataagagttttgattaagaacagcatagagcttcaaaatgcaaagtgaatgattagtaaaattatgtctcattttattttttcagcacccataccacaattaatattaggctggattgccatgggaaacattttttggcattaatgcagcaacataatactcactttaggtattactacatagttgaaggatttaactgaatgtatggatcaaatttatttatttgacatattcgaagctgtggtttaataggaatttgagaaaggtgtaagaaataggataaaaagaaggtcagcaccatgtaccaggaatagctttactttccatacatagaaatataaatttagtggtatcctatattactttagtgtcgtacgctttgtaagacttaaatattttattctattgattccactactttggtatgttaagacatttctttaaagatgaccaacaatatccttattttaggtgccactagcagatgtaagcgtatacttagttgccgttagatgtgacagaatgagataatttatgtaaagcagtagagtacctggcacaaagcaaacaataaatattattgttattgttgttataattgtaaaatgaatgacttcaaaaacatagtcccagtttggagggattttgtgatgcagaatatctaagtcatagaaatagaagacaggtggaataagtatatgttc

SEQ ID NO: 507 - DNA, 7216 bp, Homo sapiens
cacgcggccaccgagctggaggaggcggcgggcgtgagaccgggaatgcttggggcccccgccttcctcgcagccatccagcactcggtgcacgccccgcgaggccagcggctgctccctcccggggctattgctgctagtgccgtgagcaccgcccagccattgtctctgtgtctccgtcagccgtgccgagccgcgcacccagaggcgagggcgcgcatggggagcctccgttgatgctgccgcggctgccgcgccgccctccgaggctgcgtcccggggagtccggcttcccgagcgctccggcctggcccggcgccccggacctgagtgcctccccatggaggcgcccgggccggcccaggcggccgcggcggagagcaactcccgagaggtgacggaggatgccgccgactgggcgcccgcgctctgccccagccccgaggcgcggtcgccggaggcgcctgcctaccgcctgcaggactgcgacgcgctggtcaccatgggcactgggacgttcgggcgggtgcacctggtgaaggagaagacagccaagcatttcttcgccctcaaggtgatgagcattcccgacgtcatccgccggaagcaggagcagcacgtgcacaatgagaagtctgtcctgaaggaagtcagccacccgttcctcatcaggctgttctggacgtggcatgaggagcgcttcctctacatgctcatggagtatgtgccgggtggcgagctcttcagctacctgcgcaaccgggggcacttctccagcaccacggggctcttctactctgcggagatcatctgtgccattgagtacctgcactccaaggagatcgtctacagggatttgaagccggagaacatcctgctggatagggatggtcacatcaagctcacggactttgggtttgccaagaagctggtagacaggacttggaccctctgtggaacacccgagtacctagcccccgaagtcattcagagcaagggccacggaagggccgtggactggtgggccctcggcatcctgatattcgagatgctttcggggtttcctccattttttgatgacaacccgtttggcatttatcagaaaattcttgcaggcaaactatatttccccagacatttggatttccatgtaaaaacggggcgaatgatgtgaaacaccatcggtggttccgctccgtggactggaaagctgttccgcagagaaaactgaagcctcccatcgtgcccacgatagctggcaacggcgacacttccaacttcgaaacttaccctgagcatgactgggacacagccgcgcccgtgccgcagaaggatttagaaatcttcaagaatttctgaggacgagctcacatctggaagaaacaggaagattggaatctgcctggaacaaagaactgcacctaagcagaccagaagcaaaatgtcttcttcacggcctgaggacatttccagttttctctgtacctgtgtgtatagaaatagatcagagcacagttgaaattcatggaactggcattatttaagcaaccagaattccacactgtaggaaggttttgaaaattgtttcgttatagattttatcttatcttttggtgttgtcttggtttttctcatagactttataagtttgaactggacttatttgattataaccacaaattgtgtgtgtgtgtgtgtgtgtatatatagaagtcattatggcagatgcacaaattgtgcagtgatgtaaatatacatacttcacagagcctattatttttatttttcaattcagtttctcaaattatcttcccttctcttggggacaacatctgaagggtatgttgcatgcatttttaaaaaaatcatctcatatgcattgtatagtttgggggaataagatatccgggggccgggggtgtctacattcagtatctttagttcttcctacctagtaacttgagactttaaaagaagaaacatggagaagatgtgggagcgaatttattgcaggaatccacaatgactttgaagttgttggagcaatgcattgtattcagaaaacctgtgtcacattaaaaaatttcatctaggctaggtgcagtggcttgttcctgtagtcccagcactctgggaacctgggttgggaggattgcttaaggccaggagtttgagaccagcttgggcaacatagtgaaaccctgtctgtatggaatttacacaaattataaaaattagtcgggtgtcattgtgcatacctgtagtcccagctattcaggagctgtggtaggaggatggcttgagctcaagaggttgaggctgcagtgagccctgattgtgccagtgcactccagcctggacgacagagcaagaccctgtattaaaaaaaaaattcatcctgcacagggaaatggctacctattaaagtcccagttgaaattttttgaaaaaatacacctcccacagttcacaaataacttttaagatcagctcatctataaggctgaccttcatgcagagattttatttcacctttagttttgggaaaagcgagaaacagatgatctataggatgtgagtgggtggcagagtcaaaaggaacctcacctgttcctaatttctccttttaaatattcatgttgagtgtgcctaatactctcctcgacaagtcatgctgttttatgcagaataatccaggcgtgagagtgttctcttgggaaatgactggggagacacctgaaaggagcaacctccagatgttcttccctgggtgttgatgtcatgacagccatacagtgagtttgttctgaaacatctcttgctaaatgtgggtcatgctagacacagcataaactgagggtgtgggttctggctttgtacataactcattttctcccttgctttttctctggaccatcctggctggaaacttggctgtagacatctgaagagggtgcaccttttctctttactgtgactcacctcaaatatggcattgctcaaatctgctgtgtatgaggtcacagggcccagctgtggcaggggtgagtgcattgaagaagtaggttttggagccttccaggaattccttgttgacaacaggggtacactcacacagacctccaagactttcttctccacctcttctttttctcatgccctgccttcatctgtctccttctgcacccagagtaggggtggagtatacccttgccatgtgttagtgaaaatgtgtgcagtgagaagccagttgggtcccctcggctcctaatctcttctcaaaactcagtagctcaggttctctggagccatccggtgcattccttgctattggagctgtttttccaagcaatatctgggaagagatttctccctctagcacttgctacctctcttctgcacacatatcacacatcagtactgtggagagtttctgttaggaaaagccatacatttttaaaaatgtagcaaaatgtcaagggaaatgtaatcagatttggccagagttcgcctacagataagaaggcactgggccaggctcacacctgtaatcctaagtaacactttgggaggctggggcgagaggattgcttgagcccaggagttcaatacctgtctgggaaacacctcatctctacaaaatacaaaaaagttaactgggcatggtggagcatgcctgtagtctcagctactcaggaggctgagatgagaggatcacttgagcctgaggaggtccaggccacagtgatctgagatcacaccattgccctccagcctgggtgacagagtgagaccctgttccaaaaaaaaaaaaaaacccaaaaaacctcaatggctttttgcttttgaaggtggtatgaagagaacgtccactttaaggctttaaaagacagtgaagctggttgtagggctcacttttataatcctaggatttggggaagctgaagcagaaagattgcttgagcctgggagtttgagactggcctgggcagcatagcgagaccccatctctatataaaaaaaaagatgttaaaacagtgaaattacagaaacagaacatagccaccctgtttcatcagtgaccttttcttcacgtgacggtcaactcagtaggtgagaataattagtaggttcagcagaataaactctttacaattaataactcagtggaaaatgatgttcagatggtgaaatgtggaaatgttttagacaactctattttcagcctgtgcttctcactcaccatcctgttgggattaacagttgagggccatcgctgcctaaacatttagcgtgcggtttcccatcagttttactgtgaatgtgaaaaggtgaaactgttgctgacttcggcagcaggtatactaaaattggaatgacacagaggagattagcatggccccctgcgcgaggaagatccgcagattcatgcagcattccatatttttttaaaaaaaggttacactgtgcaccgacgtggagctagaaggaaaagcatgaagtctcatgtttgctgactataaaaataaatcatagtaataatattattgaacattctactttaaaaattattaataaaaccataaatgaaacacttgagcacactttaaaaagtacataaacccatgagtccatatgtgtaattttatgttgtctgttttattatccaggatttcatactcagatgagcattagcatcaggaaagcctgaaatgccttaattgtgaactgatacgcaggaaaatgaaatatgtaagcacattggtgaccttgttctttacagacatcatgatcagcctccagccatacagaacaaatgagaaattagaagcaattccaagaacgtgtgatggtgtgaaacccacttttgaccgtcacacacatttcagcatttgaagagacacaggctacctggaaactgcccatggcggggtcataatttaaatgtcccaatgtcatatagaggttaatttaatcaaaatgagctaaaacatggaacaatcactgaataatttaaaaagagtttacctggcagagtgtgtcatgcctgcaatcccagcactttgggaggccaaggcaggcagatcacctgaggtcaggagtttgagaccagcctggccaacatgatgaaacccttgtctctattaaaaacacaaaaattagccagatgtggtggcacatgcctgtaatcccagttagtcgggaggctgaggcaggagaatatggaactcaggaggcggaggctgcagtcaaccaagattgcgccactgcactccagccagggcgaaggagtgagactcccatctcaaaaaataaaaaaaaaaataaataaaaatagttgacccgggtgggcattccaaaatgttcccatagatgatcgtgaaacaatcactgtgcaaaatgtagaggaaaattcttacgataatcacaaaatttgtatcagaaaaacattacaaatttactttgctccatgtaattttatgaattggcagtattttcttaaattgggatacagtaagagaatatctttaggaaatggaaatgttaaaacaagaagtaacaagaggttgtttttctgaagggaaatgccaccggcctgctttcataggcattgataaagccaggaaggaaataaagtcacaaccgaatagtatacactgtatctactgaattcttctaattccttcacaacagaagtctaaatcctgcttagcctaaacatatctatagccagcgatgggcaaattatatttgctgtcagcatgatggaataagaaacagaaaccccccagcagtggggtaagattgcacgcttcatcccctcaaaatgcagttcagccccactccctctccatgcccatcaaacaactgcaaaatcacttgttactgaatttctcattcagcgttttgtttctttctgtccatacttaaagaccaaattatttgtttgctttgaagaaaaagcaaaagcaacaaaaacaccaaatcatttgaaatcactacccattaaaaaaaatcaccagtggaactaaacagttgagtggtttgggatgtgttgttcgccatttctgtgtttgacctacatggtctctagttctttggacaattgtaactgtgaaactatggcttaacactgttaaagactccaaggctccactctgtagccaggtgcaactcaggctgcacaaataccccaccagaatgtcacaatcattcattgctccagctgctgagtgaacagagtgcaagacagcactggcttgggttttatttttgcagccagttaactttgcatcaggtctacacagtccttgcagcctttgatttctccagttgtacagatttgaaatggggtgcccgggttcctctcgtttttccttcaatctacctagcatgcattttacacacattggaggagtcgtatgcactgtttttctcttgctgatggaggcaagaacgccttctaattagtataacttaaatggacgggattcacttaaaagcaagaagaaaagcacatgaacaggtgtcttaatgcatttggatactttggggtgtgtgcctgtctgtgtgtgtgtcttggtgaaggtgggctgtattttcaccaagccttttcataatcaagtttgctttgcaaaccatctggccttgcccccagcagtacagtccttcctaataacggggatgctctgtcatgtttctctgtaaattgttgtgtgttgggaagttctgttgaggcttagtttgatcttccatggtggacatgtctgttctgtatataaaaagcattacatctgtgttttagcaggtgggatttgaagcttttccacagtccttgtgctctgagatggctgttgagctctgctcagctgtcacagctgaattctttttttgtgctgaacactgggcagcctcaccttgttgccaacgtgcttctggggcccctgtgactgctgccggatgctgtgcacacaggcagagtgccttggcaggtttgtgcaccccttggcgagccagaactgggaaccccgcggagtgaccccaccttctcatggggggtcagggaggggagtgcctatttttaatcttgtttgttgcgcaatggaaatcactgtgatttgtacatatgccctaggaaaattttaccgctgtctaatttatgtaataatactgatgattctaggtttgtttaataaaactttatatcttttcagaa

SEQ ID NO: 508 - DNA, 3047 bp, Homo sapiens
tcttgcgtcaagacggccgtgctgagcgaatgcaggcgacttgcgagctgggagcgatttaaaacgctttggattcccccggcctgggtggggagagcgagctgggtgccccctagattccccgcccccgcacctcatgagccgaccctcggctccatggagcccggcaattatgccaccttggatggagccaaggatatcgaaggcttgctgggagcgggaggggggcggaatctggtcgcccactcccctctgaccagccacccagcggcgcctacgctgatgcctgctgtcaactatgcccccttggatctgccaggctcggcggagccgccaaagcaatgccacccatgccctggggtgccccaggggacgtccccagctcccgtgccttatggttactttggaggcgggtactactcctgccgagtgtcccggagctcgctgaaaccctgtgcccaggcagccaccctggccgcgtaccccgcggagactcccacggccggggaagagtaccccagccgccccactgagtttgccttctatccgggatatccgggaacctaccagcctatggccagttacctggacgtgtctgtggtgcagactctgggtgctcctggagaaccgcgacatgactccctgttgcctgtggacagttaccagtcttgggctctcgctggtggctggaacagccagatgtgttgccagggagaacagaacccaccaggtcccttttggaaggcagcatttgcagactccagcgggcagcaccctcctgacgcctgcgcctttcgtcgcggccgcaagaaacgcattccgtacagcaaggggcagttgcgggagctggagcgggagtatgcggctaacaagttcatcaccaaggacaagaggcgcaagatctcggcagccaccagcctctcggagcgccagattaccatctggtttcagaaccgccgggtcaaagagaagaaggttctcgccaaggtgaagaacagcgctaccccttaagagatctccttgcctgggtgggaggagcgaaagtgggggtgtcctggggagaccaggaacctgccaagcccaggctggggccaaggactctgctgagaggcccctagagacaacacccttcccaggccactggctgctggactgttcctcaggagcggcctgggtacccagtatgtgcagggagacggaaccccatgtgacagcccactccaccagggttcccaaagaacctggcccagtcataatcattcatcctgacagtggcaataatcacgataaccagtactagctgccatgatcgttagcctcatattttctatctagagctctgtagagcactttagaaaccgctttcatgaattgagctaattatgaataaatttggaaggcgatccctttgcagggaagctttctctcagacccccttccattacacctctcaccctggtaacagcaggaagactgaggagaggggaacgggcagattcgttgtgtggctgtgatgtccgtttagcatttttctcagctgacagctgggtaggtggacaattgtagaggctgtctcttcctccctccttgtccaccccatagggtgtacccactggtcttggaagcacccatccttaatacgatgatttttctgtcgtgtgaaaatgaagccagcaggctgcccctagtcagtccttccttccagagaaaaagagatttgagaaagtgcctgggtaattcaccattaatttcctcccccaaactctctgagtcttcccttaatatttctggtggttctgaccaaagcaggtcatggtttgttgagcatttgggatcccagtgaagtagatgtttgtagccttgcatacttagcccttcccaggcacaaacggagtggcagagtggtgccaaccctgttttcccagtccacgtagacagattcacagtgcggaattctggaagctggagacagacgggctctttgcagagccgggactctgagagggacatgagggcctctgcctctgtgttcattctctgatgtcctgtacctgggctcagtgcccggtgggactcatctcctggccgcgcagcaaagccagcgggttcgtgctggtccttcctgcaccttaggctgggggtggggggcctgccggcgcattctccacgattgagcgcacaggcctgaagtctggacaacccgcagaaccgaagctccgagcagcgggtcggtggcgagtagtggggtcggtggcgagcagttggtggtgggccgcggccgccactacctcgaggacatttccctcccggagccagctctcctagaaaccccgcggcggccgccgcagccaagtgtttatggcccgcggtcgggtgggatcctagccctgtctcctctcctgggaaggagtgagggtgggacgtgacttagacacctacaaatctatttaccaaagaggagcccgggactgagggaaaaggccaaagagtgtgagtgcatgcggactgggggttcaggggaagaggacgaggaggaggaagatgaggtcgatttcctgatttaaaaaatcgtccaagccccgtggtccagcttaaggtcctcggttacatgcgccgctcagagcaggtcactttctgccttccacgtcctccttcaaggaagccccatgtgggtagctttcaatatcgcaggttcttactcctctgcctctataagctcaaacccaccaacgatcgggcaagtaaaccccctccctcgccgacttcggaactggcgagagttcagcgcagatgggcctgtggggagggggcaagatagatgagggggagcggcatggtgcggggtgaccccttggagagaggaaaaaggccacaagaggggctgccaccgccactaacggagatggccctggtagagacctttgggggtctggaacctctggactccccatgctctaactcccacactctgctatcagaaacttaaacttgaggattttctctgtttttcactcgcaataaattcagagcaaacaaaaaaaaaaaaa

SEQ ID NO: 509 - DNA, 6594 bp, Homo sapiens
ccggtctataggtgcataccaccacaccaggctaattttttttttttgagacggagtctcactctgtcacccaggctggagtgcaatggcgcgatctttgctcactgcaacctctgccacccgggttcaagcaattctcctgcctcagctcctgagtagctgggattacaggcgcccgccaccacgcccggctaatttttgtatttttagtagagacgaggtttcaccatcttggccaggctggtcttgaactcctgaccttgtgatctacctgccagggccttccaaagtgctgggattacggacgtgagccaccacgcctggcccaggctaattttttgaaattttaatagaggcagggtcttgctgtattgcccaggctgctctcacattcctagccttaagccatcctcctatctcggcctcacaaagtgctgggattacaggtgtaagccactgtgcctggttttgggcaagtttcttgtcctgactgtgtcttgggttctcacctgttgattggggatacccttgttgcctacctccaagtaattttatgaggatgaaactcatagcttgtcagtgggaagtgcttaggtaatgagctactagtggtggcagtggctgtgatggtggtattaataccactcctactggatggtctctaatactatctccttccttccctaccagcaacatgtcatggtttagtggcctcctggtccctaaagtggatgaacggaaaacagcctggggcgaacgcaatgggcagaagcgttcgcggcgccgtggcactcgggcaggtggcttctgcacgccccgctatatgagctgcctccgggatgcagagccacccagccccacccctgccggcccccctcggtgcccctggcaggatgacgccttcatccggaggggcggcccaggcaagggcaaggagctggggctgcgggcagtggccctgggcttcgaggataccgaggtgacaacgacagcgggcgggacggctgaggtggcgcccgacgcggtgcccaggagtgggcgatcctgctggcgccgtctggtgcaggtgttccagtcgaagcagttccgttcggccaagctggagcgcctgtaccagcggtacttcttccagatgaaccagagcagcctgacgctgctgatggcggtgctggtgctgctcacagcggtgctgctggctttccacgccgcacccgcccgccctcagcctgcctatgtggcactgttggcctgtgccgccgccctgttcgtggggctcatggtggtgtgtaaccggcatagcttccgccaggactccatgtgggtggtgagctacgtggtgctgggcatcctggcggcagtgcaggtcgggggcgctctcgcagcagacccgcgcagcccctctgcgggcctctggtgccctgtgttctttgtctacatcgcctacacgctcctccccatccgcatgcgggctgccgtcctcagcggcctgggcctctccaccttgcatttgatcttggcctggcaacttaaccgtggtgatgccttcctctggaagcagctcggtgccaatgtgctgctgttcctctgcaccaacgtcattggcatctgcacacactatccagcagaggtgtctcagcgccaggcctttcaggagacccgcggttacatccaggcccggctccacctgcagcatgagaatcggcagcaggagcggctgctgctgtcggtattgccccagcacgttgccatggagatgaaagaagacatcaacacaaaaaaagaagacatgatgttccacaagatctacatacagaagcatgacaatgtcagcatcctgtttgcagacattgagggcttcaccagcctggcatcccagtgcactgcgcaggagctggtcatgaccctgaatgagctctttgcccggtttgacaagctggctgcggagaatcactgcctgaggatcaagatcttgggggactgttactactgtgtgtcagggctgccggaggcccgggccgaccatgcccactgctgtgtggagatgggggtagacatgattgaggccatctcgctggtacgtgaggtgacaggtgtgaatgtgaacatgcgcgtgggcatccacagcgggcgcgtgcactgcggcgtccttggcttgcggaaatggcagttcgatgtgtggtccaatgatgtgaccctggccaaccacatggaggcaggaggccgggctggccgcatccacatcactcgggcaacactgcagtacctgaacggggactacgaggtggagccaggccgtggtggcgagcgcaacgcgtacctcaaggagcagcacattgagactttcctcatcctgggcgccagccagaaacggaaagaggagaaggccatgctggccaagctgcagcggactcgggccaactccatggaagggctgatgccgcgctgggttcctgatcgtgccttctcccggaccaaggactccaaggccttccgccagatgggcattgatgattccagcaaagacaaccggggcacccaagatgccctgaaccctgaggatgaggtggatgagttcctgagccgtgccatcgatgcccgcagcattgatcagctgcggaaggaccatgtgcgccggtttctgctcaccttccagagagaggatcttgagaagaagtactcccggaaggtggatccccgcttcggagcctacgttgcctgtgccctgttggtcttctgcttcatctgcttcatccagcttctcatcttcccacactccaccctgatgcttgggatctatgccagcatcttcctgctgctgctaatcaccgtgctgatctgtgctgtgtactcctgtggttctctgttccctaaggccctgcaacgtctgtcccgcagcattgtccgctcacgggcacatagcaccgcagttggcatcttttccgtcctgcttgtgtttacttctgccattgccaacatgttcacctgtaaccacacccccatacggagctgtgcagcccggatgctgaatttaacacctgctgacatcactgcctgccacctgcagcagctcaattactctctgggcctggatgctcccctgtgtgagggcaccatgcccacctgcagctttcctgagtacttcatcgggaacatgctgctgagtctcttggccagctctgtcttcctgcacatcagcagcatcgggaagttggccatgatctttgtcttggggctcatctatttggtgctgcttctgctgggtcccccagccaccatctttgacaactatgacctactgcttggcgtccatggcttggcttcttccaatgagacctttgatgggctggactgtccagctgcagggagggtggccctcaaatatatgacccctgtgattctgctggtgtttgcgctggcgctgtatctgcatgctcagcaggtggagtcgactgcccgcctagacttcctctggaaactacaggcaacaggggagaaggaggagatggaggagctacaggcatacaaccggaggctgctgcataacattctgcccaaggacgtggcggcccacttcctggcccgggagcgccgcaatgatgaactctactatcagtcgtgtgagtgtgtggctgttatgtttgcctccattgccaacttctctgagttctatgtggagctggaggcaaacaatgagggtgtcgagtgcctgcggctgctcaacgagatcatcgctgactttgatgagattatcagcgaggagcggttccggcagctggaaaagatcaagacgattggtagcacctacatggctgcctcagggctgaacgccagcacctacgatcaggtgggccgctcccacatcactgccctggctgactacgccatgcggctcatggagcagatgaagcacatcaatgagcactccttcaacaatttccagatgaagattgggctgaacatgggcccagtcgtggcaggtgtcatcggggctcggaagccacagtatgacatctgggggaacacagtgaatgtctctagtcgtatggacagcacgggggtccccgaccgaatccaggtgaccacggacctgtaccaggttctagctgccaagggctaccagctggagtgtcgaggggtggtcaaggtgaagggcaagggggagatgaccacctacttcctcaatgggggccccagcagttaacagggcccagccacaaattcagctgaagggaccaaggtgggcattgagtggactctgtgctcactgggtggagctgtggcagggggcactgagcctccagaccctgctaaccacaaaagggaacatcccagcaggctgtgcttggatcatgctcgtctgccctcaagctggaaaacaaggggctacctaccgagaggattatgcaagtgactttctttcttacttggggtagggctgttccctctccaatcttccagcctttgggagcaggggaggggtcagtagcagaagcagagggaggcctcttgcctgagggattaaaatggcagcttgccatgcctacccttccctgtctgtctgggcagcaggttcagggctgagcccttcttttccctcttttttcctgggaatattttgtacaatattttgtacaaagacaggcatgaggagtgcctattccatgcttgcctttgcaatacctgcatccccagcactggtcctgggcacttccccaccccagccaggtgtccctcctatgcacagagcagaggagggagaagctctggggagccagctttggccatatttcaggagaatgtttccatgtgccaaatcttagtcccatgatctgtccccaaaggggaacaaagggacctctgacagcttagatttagccccagttcctgcacgctccagggaacggggtgtctggcctcactggtactgtgaaaaatgctcagagagcaagcctgtgtgtggggatgtcaggtcaggagctggaagttcacctgcaggtgccaaagagcaggccggccagggctggggcagtgccagactctgatctgaggaccccgtcggggtccagatcaggtcactctgccccagtgctctcttgctgtctgctgacaagggggcatggagcatctcttcctcttctgttgccaaatagaaaagggtcagggcatggagaaaggtgaccctgatcccaaacctgccctcccaagtctctggtgttggggagggcccgtgtgtttgtgtaactgtgtgtgcatgttggtctttgtgtgcatatctgttttccaggtctatgtgagtccttgtgctcctgctcctcagctctccaccccaggttgcctctctcctgtgggcctctgtcttctgggaataaagcagggtttcctacttcaggggatgtagagagatgcccaggttgcacaggagtgggatggggtgtggtagcaaaaggagggagaggagtcctttttgtgccaaatccctaagtgccgttcgggggccatgtgtgcagcatgactctccctgtctgtggcagggacccaagcgcttgcttaagccccagtgctccatgccagcacttgaactgtctggggtttgatggacagaggctgaggaatttcctggcttccccagatagtgtcctgggacatggtatgctttggggctggggtagcatggaatccctctgaggacctggatactggtactacggggtggggaagaggaaccttaaacttggctttccccagccttcagcctgagtctagcatgtttctagctccccagtcccttgtgaagccttgagggctggcagaagggttaggaggttgaactctagattcccttcctgtctttgccttccttttacccctttccctgcaacctccttgactctggcctgaatttgttggtgcctcagtttctctgtctgtacctatttaagccaaaggcactagcctgaattttgcttgaagatcactttgtcttggaaatgactagagaggcagaggagaagggtttccagagttgctaggtttgggagtggaaggggcaggcagtgcacttgcccctcctcatgccccttctgacaccagctccctgtggaggcctggtttctgggtaatgcctcccttgggcatcttcatgcatcaaccaaatgggccatcaggtacttcattagtcatggcagaaggaggggaaaagacttgttttccagacagaaaatctactcccctgtccccagccatatccctggataggaagggataggaagagactacttggtgccatggggtaggggtgagggtataagtagatcagagtgggaagacctcagccttgggtggcttgtctctgcttcttgccaggtgggagggcctgtccacaccctggatccccgtaccacagtgccagccatgcccttcccctgggctaccattgtccctttcctcacccagttggtagaggagtcaggaggtgggaggccgtgggctttggttttataatgtaaccactgtgggggtgggggaggatggtgaaccatgtatttcagtgaaatatttaatatatttaaatatcaataaaatcaaactctttgt

SEQ ID NO: 510 - DNA, 3199 bp, Homo sapiens
gcagtcgcagctgaccctcgctcccgcccccgcctggagtccgacgtggaagttgctggctgactgggcttgcgaggaaaccgcctcggagctgcagccgaaggccaaggaatcactgaagatcggcgagggaggacagggggttcatcatgggtggctttttctcaagtatattttccagtctgtttggaactcgggaaatgagaattttaattttgggattagatggagcaggaaaaaccacaattttgtacagattacaagtgggagaagttgttactactatacctaccattggatttaatgtagagacggtgacgtacaaaaaccttaaattccaagtctgggatttaggaggacagacaagtatcaggccatactggagatgttactattcaaacacagatgcagtcatttatgtagtagacagttgtgaccgagaccgaattggcatttccaaatcagagttagttgccatgttggaggaagaagagctgagaaaagccattttagtggtgtttgcaaataaacaggacatggaacaggccatgacttcctcagagatggcaaattcacttgggttacctgccttgaaggaccgaaaatggcagatattcaaaacgtcagcaaccaaaggcaccggccttgatgaggcaatggaatggttagttgaaacattaaaaagcagacagtaattcagtccattcttctcccctgaaatgaagactacatcacctctctccctttggaaacagtcaagtgtacttcacactactagatgttaaaactatatgattattggcatatactgactgactgcaatatttgtagtaaatagggaaaataagtatttagttggagggataatttgatcgaatcacctgaatgttctatgtaatgtaaaatattcttttcttgctttcttgtgttaaggtatatattctatttgtatggaattcttattcaaatacagttctattaaagagtatactcctattggatgaaaaaaacctatttttgaatagtagttgcagcttgtttgtataaatactaaaaaatatcttaacagatttttttccccttaaaatgaattatctttccaaagattagactcagtatgagagtaggtgaggaacatagtttgtgtaatataatctttatttgcttacctgaccactttttattaagctgttttgtttaaaagcttttggttataggcatgaatattgttttgatggttaacttcactgacttatctgtaagtgtcattttatagtactttacagttgtcaaaaaaaatcttacatatattgatctagttgatcggtagaggaagcttgtgaagtaggtaggacaggttatgatgtcttcactgtatggacgtgaacccagggttctaataggttggcttgcccaaggtcacctgctagcttgtaaggtaggaatagggctcaaagtaaaacttttggttcagaagcttgactcataaactatactatatattcccaaaaatgtcagtattgacaacacagtctaactcttaaataaaattatgctaattagttacattcaaaataatgtttataaatttatttgtctatactagtagaagtgatcagtgacatactataaataatcctaaatggttatatttgatagaattcataacacattaaagagaaaatttcacattaaaggaaggtttaaaaatctattttcagattataaaaggtgtctttactggttttcattccttttatctacatgtaattggacatgtaaacttgttaaaaatcaaaatcttactgattgtacagggagaaattaagcattctgttttaaaaattaggcttattgctagactgtaagtttaaaaacaattcatgttcaaaggagcttttcaaattacccagtccaccacagaatcagctaatgtgacagaagtaaatatagtgcgtcataattgctaaaaacagggtgaatttctttcacttaagttggaaaaccagcctctaaaaaattaggtgctggtaatgagagcttaataccatggttccctgcaggtctcagaaacattagtagttcctttcttggccctcactgtccttccagtgttggcctctggcctcttcccctcacatttatgttcattctccgggcttatattcattctctgctgctttctcccttcacccgtgggactctcacccttcttgctcattctccagcacccattcctactttagtctctttgaaatcttttttggagattttccttcagctacaaatgttccagtacaaccaatattactcctgaggggcaaagactttttcatatttatgtccctagtatctggtatggcgcctggcatatggcatttcagaatatgttcatagttgaaacagtaggatagatatttgtcatcttgacaagtagccctttgcaatttatacttgagttcactcctggtcaatggcacatggctggaaaatgcagaaagcaagttcacttacagcctgaggcttataaagcttgtacagctgcctcccggcagtccaggaaaactgcaaaaaatgggaagtaaggtcctggcaggcagacccggcatgtagccgctggccatcttgaatcctagggcatgaagttgccccaaagttcagcacttggttaagcctgatccctctggtttatcacaaagaataggatgggataaagaaagtggacacttaaataagctataaattatatggtccttgtctagcaggagacaactgcacaggtatactaccagcgtttggatattgatatatacatggcaaatctgaatattgttttatgagaggcctggcaatgggtaaaacaccaaacttgaaatcagaacataggtgcaaatggccactcctgtagtttcttttctgtaaaatgggatctggacgaatgataccaaacgtttctttctaacattgtattttataactctggcctatgattgtgttgtgtcttgcattaaaaaaaaaaatttgagagtggtagaattacttctgttatctgaaatacctgagatgcactttaaactgttgaaatgtaagctctgagggcagggaccgtatcttatttactgttagtatccgttgcatctagtgtggtgcacctggcacacagtaggcactcaataaatatgtattgattaaaaacaaa

SEQ ID NO: 511 - DNA, 6147 bp, Homo sapiens
gcgggcgccggcaatcgagtggcttcctggccatggagaggagatctggacccgaggacgccagggactcctctccgtctccctggaccgctgtgtaggcacctgagttaacggacgctaagcggggtaggggaagtaacagtgtatcatgtatgccactgattccaggggacactcccctgctttcctccaacctcagaatggaaatagtcgtcacccatctggctatgttccagggaaggttgtcccattgcgtccccctcctcctccaaagagtcaagcttcagccaaatttacctccatcagacgagaagaccgggcaaccttcgcattctcacctgaagaacagcaagcccagagagaaagtcaaaagcaaaagagacacaaaaatactttcatttgttttgctattactagtttctcattttttattgcacttgcaatcattttaggaatatcctcaaaatatgctccagatgaaaattgcccagatcaaaatcctcgtctcaggaattgggatccaggacaagattctgcaaagcaagttgttatcaaggagggagatatgctccgtctgacctcagacgccaccgtgcattctatagtcattcaggatggaggactgcttgtatttggggacaataaagatggatccagaaatattactttgaggactcattacatcctgatccaggatggtggggcgcttcatattggagcagaaaaatgccgctataaatccaaagcgacaattaccttgtatggcaagtcagatgaaggtgaaagtatgccaacatttggcaaaaagtttattggtgtggaagctggcgggacactggagttacatggggcacggaaggcatcgtggacgttgttggcaaggaccctgaattcctcaggcttgccctttgggtcctatacctttgaaaaggacttttcccggggcctcaatgtgagggtcattgaccaagacacggccaaaattttggaaagtgagagatttgatacccatgaataccgcaatgagagcaggcggcttcaggagtttctgagattccaggatccaggtcggattgttgccatagctgtcggggattcagccgctaaaagtctcttacaaggaaccatccagatgatccaggaacggttgggaagtgaactgatccaaggactgggctacaggcaagcttgggctttagttggtgtcattgatggtggaagcacttcttgcaatgaatccgtgagaaactatgaaaatcatagcagtggcgggaaggctcttgcccaaagagaattttatactgtggatggccagaagttctctgtgacagcttatagtgaatggattgaaggcgtttctctttcaggattccgggtagaggttgtagatggagtgaagctaaatttgctagatgatgttagtagttggaaacctggagaccagattgtggtcgcaagcacagactattccatgtaccaagcagaggagttcactcttcttccctgttctgaatgcagccattttcaggtcaaagtcaaagaaacccctcagttcctgcacatgggtgagatcatagacggtgtagacatgagagctgaggttggaattcttacccggaatattgtgatccaaggagaagtggaggactcatgctacgcagaaaatcagtgccaattttttgattatgatacctttgggggacacattatgataatgaaaaattttacttcagtccatctttcttatgtggaattgaaacacatgggtcagcagcagatggggcgataccctgttcattttcacctgtgtggtgacgtggattataaaggaggatacagacatgcaacatttgtggacggcctgtctattcatcacagcttctcaaggtgcatcactgtgcatgggacaaatggcttgctaataaaagacaccattgggtttgacacactaggtcattgtttctttttggaagatggtattgaacagaggaatactttgttccacaatctgggactcctcaccaagccgggtactctcctgcccaccgataggaacaactccatgtgtaccaccatgcgagataaagtgtttggaaattacattcctgtgcctgctactgactgtatggctgtttcaactttctggattgctcatcccaacaataatctgattaataatgcagctgcaggctcacaggatgctggaatatggtatttattccacaaggaaccaactggggaatccagtggattgcagctcttggcaaaaccagaactcactccattgggtatattttataacaacagggtccattcaaattttaaggctggcttatttattgacaaaggtgtcaaaacaaccaactctagtgctgctgacccaagggaatacctctgtttggacaatagtgcaagatttcgacctcatcaggatgcaaaccccgaaaaaccacgtgttgctgctctaattgacaggctcattgcttttaaaaataatgataatggagcttgggtcagaggaggagatattatcgttcaaaattcagcatttgcagataatggaataggactgacctttgccagtgatggaagcttcccaagtgatgaaggttccagccaagaggtatctgaatctctctttgttggggagagcaggaattacggctttcagggtggtcagaacaagtatgtaggcactggaggaatagaccagaagcctcgaacattacccaggaacaggacgttcccaattagaggctttcagatttatgatgggcccattcatctcacaaggagcactttcaaaaaatatgtgccaactccagataggtacagcagtgcaattggcttcctcatgaagaattcctggcagataacccccaggaataatatctccctcgtgaagtttggtccacatgtctctctgaatgtcttttttggaaagcctggtccctggtttgaagattgtgagatggatggtgataagaactccatattccatgacattgatggctctgtgacaggatacaaggatgcttatgtgggaagaatggacaactacctgatccgccatccaagctgtgtaaatgtgtctaagtggaatgcagtgatctgcagtgggacctatgcacaggtctatgtacagacatggagcactcagaatctttctatgaccattacacgagatgagtatccgtccaaccctatggtgctccgaggtattaatcagaaggctgcctttccacagtaccagcctgtcgtcatgctggagaagggttataccatccactggaatgggccggcaccacggactacatttctatacctcgtcaacttcaacaagaatgactggattcgagttggcctttgctatccatcaaacacaagttttcaagttacctttggctatttgcagcggcagaatggctcattatccaaaatcgaagaatatgagcctgtgcattcactggaagaactgcaaagaaagcaatccgagaggaaattctattttgactccagcacggggttactgtttttgtatctcaaagccaaaagccacaggcatggccacagttactgttcatctcagggatgtgaaagagtcaagatccaagcagccacagactcaaaggacatcagtaactgcatggccaaagcatacccacagtactacagaaagccgtcagtggtcaagcggatgccggccatgctcactggactctgtcaaggctgtggcactcggcaggtggtgtttactagtgatcctcataaaagttacctccctgtgcaattccagtcacctgataaagcagaaacccagcgtggagacccgtctgttatttctgtcaatggcactgactttaccttccgaagtgcaggcgtcctcctccttgttgtggatccgtgcagcgttccattccgcttgacggaaaaaacggtttttcctcttgctgatgtcagtcgcattgaagagtatttaaaaacaggcatccctccaaggtccattgttctgttgagcacaagaggagaaataaagcagttaaacatttcacacttactagtacctctgggattagccaaaccagctcatctttatgacaaagggagtaccatatttttgggattcagtggaaactttaaaccatcatggactaagctatttaccagtcctgctggacagggccttggggtgcttgaacaattcatacctttgcagctggacgaatatggttgtcccagagccaccactgtccgcagaagagacctggaactgctaaagcaagcttcaaaagcacattagagactaactgtaacttaagtgctgggggaaaaaaaatgtgaactaacttatttaatttatggcattttaaaatgacactgttaacccaacggaaccattttccagtttgatacagaatggggagaaaagaaagcgtttgaaattattgcttggataccagcttcatgcaccttctagttgtacaaaatgttaaagacgttgtttgtatttgtaaggctggtgtattcagagagcagatctcttattcctcactttccacccccgtattttgtaatgaccatgagcaatgtttttactttttgtataatggggtggggtggagtgggggcttctgagagtcagcctgaggtctttagaggaccagctattgtagcaccttggatacttgaagtttaatgctcagttgggtcgggtggcagttgacttggtggctggcatgttcagcagtgcctggggccctgtttctgggcagcctttgaggattttctatgatattgaatgacagttttaagtggcaactcaggcccagctcatgcccttttttgcctggacatgtgctatttttattcacttatatatcaattacttgtaagggttaaactttcaaacaggaagtatattgggacaaaagggctcttggggattagatatccctttaatctgtgaccatggggcaaaaaattttcctgcagcaaaagtctgaggctgttgggaccatttttgcagctttaatccttagcctcttttgactgtatatttgtgtttaaaatgcagagctcaactgaatatttccttttttgttttgttttgttttgttttaagaagtaggttgttttcctgaaccgtaaacttgtatcattttaacttgcacaaaggaagtctgttcttggtattgctcttgcacttgggttttttgttattgttttgtgtggattttttaaagcttttctgttcaccctcctgccaggaaaatcccagaaagcttaatgataccccaaaatgattacacccagggaggaaaaaaaggagcgctttctagggtcagaatcgtggagagaatactcagaacatgaacctctttaaagccttgcaggaatgagtcactcttacttaatgaaatgttaaagccaattaaaaagcatgctgtgatgcccagcttccctttccacagggtgcatgcgtctcctgctggtgaatcacatgcggcaagaggcaactggctccacagcctgggatgctgccgtaccaagaggaaagaagcagcaaaatgcctttacgttgttctaaacccccgacgcataaagtgtagaggagggatggccaagggtgggtggtagaaagtgtgttcaggctgacactggcaatgagtacagataatttcactttcctcttccaggggcaaaggctgatggcctctacctttgtatccaggagaaactgcagagcagccctgtgactttacaaaatatgctacctcaaagtgctaccgataaacctttctaattgtaagtgcccttactaagggcacatgtcttaatcaaagttagttttttgttttctggtttgttttttttttttttgtatattgatgaatgagatcttacctattaaatatattattggaaaaaaaaaaaaaaaaaaaattaaagtttgagtgtgtgtgtgtgtgtgtgtgtgtgtgtgtgtgtgtgtgttttatgacttaaatatctttacgtgtgttttttagagcttggttctttaaagatttggagaagatatgtaaattaccaaggcacttggtttttctgttttatatactaataatcagggcctaagttaaataaaaatatgtgtgcatgtatttt

SEQ ID NO: 512 - DNA, 2547 bp, Homo sapiens; identical to SEQ ID NO: 289

SEQ ID NO: 513 - DNA, 2509 bp, Homo sapiens
tttttctggtagaaggcggggttctcctcgtacgctgcggagtctctgcggggtgtagaccggaatcctgctgacgggcagagtggatcagggagggagggtcgagacacggtggctgcaggtctgagacaaggctgctccgaggtagtagctctcttgcctggaggtggccattcattcctggagtgctgctgaggagcgagggcccatctggggtctctggaagtcggtgcccaggcctgaaggatagccccccttgcgcttccctgggctgcggccggccttctcagaacgaagggcgtccttccaccccgcggcgcaggtgaccgctgccatggcttttccccatcggccggacgcccctgagctgcctgacttctccatgctgaagaggctggctcgagaccagctcatctatctgctggagcagcttcctggaaaaaaggatttattcattgaggcagatctcatgagccctttggatcgaattgccaatgtctccatcctgaagcaacacgaagtagacaagctatacaaggtggagaacaagccagccctcagctccaatgaacaattgtgcttcttggtcagaccccgcatcaagaatatgcgatacattgccagtcttgtcaatgctgacaaattggctggccgaactcgcaaatacaaagtgatcttcagccctcaaaagttctatgcgtgtgagatggtgcttgaggaagagggaatctatggagatgtgagctgtgatgaatgggccttctctttgctgcctcttgatgtggatctgctgagcatggaactaccagaatttttcagggattactttctggaaggagatcagcgttggatcaacactgtagctcaggccttacaccttctcagcactctctatggaccctttccaaactgctatggaattggcaggtgcgccaagatggcatatgaattgtggaggaacctggaggaggaggaggatggcgaaaccaagggccgaaggccagagattggacatatctttctcttggacagagatgtggactttgtgacagcactttgctcccaagtggtttatgagggcctagtagatgacaccttccgcatcaagtgtgggagtgtcgactttggcccagaagtcacatcctctgacaagagcctgaaggtgctactcaatgccgaggacaaggtgtttaatgagattcggaacgagcacttctccaatgtctttggcttcttgagccagaaggcccggaacttgcaggcccagtatgatcgccggagaggcatggacattaagcagatgaagaatttcgtgtcccaggagctcaagggcctgaaacaggagcaccgcctgctgagtctccatattggggcctgtgaatccatcatgaagaagaaaaccaagcaggatttccaggagctaatcaagactgagcatgcactgctagaggggttcaacatccgggagagcaccagctacattgaggaacacatagaccggcaggtgtcgcctatagaaagcctgcgcctcatgtgccttttgtccatcactgagaatggtttgatccccaaggattaccgatctctgaaaacacagtatctgcagagctatggccctgagcacctgctaaccttctccaatctgcgaagagctgggctcctaacggagcaggcccccggggacaccctcacagccgtggagagtaaagtgagcaagctggtgaccgacaaggctgcaggaaagattactgatgccttcagttctctggccaagaggagcaattttcgtgccatcagcaaaaagctgaatttgatcccacgtgtggacggcgagtatgatctgaaagtgccccgagacatggcttacgtcttcagtggtgcttatgtgcccctgagctgccgaatcattgagcaggtgctagagcggcgaagctggcagggccttgatgaggtggtacggctgctcaactgcagtgactttgcattcacagatatgactaaggaagacaaggcttccagtgagtccctgcgcctcatcttggtggtgttcttgggtggttgtacattctctgagatctcagccctccggttcctgggcagagagaaaggctacaggttcattttcctgacgacagcagtcacaaacagcgctcgccttatggaggccatgagtgaggtgaaagcctgatgtttttcccggccagtgttgacatcttccctgaacacattcctcagtgagatgcaggcatctggcacccagctgctataaccaagtgtccaccaactacctgctaagagccgggagcatggaacgtgttgggatttagagaacattatctgagaaaagagttcacttcctgctcccaggatatttctcttttctgtttatgaagtacaacccatgctgctaagatgcgagcaggaagaggcatcctttgctaaatcctgtttgaatgtcattgtaaataaagcctctgctctcagatgtaaaaaaaaaaaaaaaaaaaaa

SEQ ID NO: 514 - DNA, 1474 bp, Homo sapiens; identical to SEQ ID NO: 287

SEQ ID NO: 515 - DNA, 3434 bp, Homo sapiens
attagttgtctctgccgctggggaaggtaaagcggcgacggcgtcctcaggagctgtggggtcccctgctagaagtgggggactcggcgggggagtcatttaatacttcatgattagaacaaatatgtgaaagttcccaccaaccagtgagaatttcttccttcagacggttttggatcttactgcacagctttctgagaagttcttttggtgccatgttttgtggcttgcatcaaaagaggagtttgtcttcatgaagattcctaacattggtaatgtgatgaataaatttgagatccttggggttgtaggtgaaggagcctatggagttgtacttaaatgcagacacaaggaaacacatgaaattgtggcgatcaagaaattcaaggacagtgaagaaaatgaagaagtcaaagaaacgactttacgagagcttaaaatgcttcggactctcaagcaggaaaacattgtggagttgaaggaagcatttcgtcggaggggaaagttgtacttggtgtttgagtatgttgaaaaaaatatgctcgaattgctggaagaaatgccaaatggagttccacctgagaaagtaaaaagctacatctatcagctaatcaaggctattcactggtgccataagaatgatattgtccatcgagatataaaaccagaaaatctcttaatcagccacaatgatgtcctaaaactgtgtgactttggttttgctcgtaatctgtcagaaggcaataatgctaattacacagagtacgttgccaccagatggtatcggtccccagaactcttacttggcgctccctatggaaagtccgtggacatgtggtcggtgggctgtattcttggggagcttagcgatggacagcctttatttcctggagaaagtgaaattgaccaactttttactattcagaaggtgctaggaccacttccatctgagcagatgaagcttttctacagtaatcctcgcttccatgggctccggtttccagctgttaaccatcctcagtccttggaaagaagataccttggaattttgaatagtgttctacttgacctaatgaagaatttactgaagttggacccagctgacagatacttgacagaacagtgtttgaatcaccctacatttcaaacccagagacttctggatcgttctccttcaaggtcagcaaaaagaaaaccttaccatgtggaaagcagcacattgtctaatagaaaccaagccggcaaaagtactgctttgcagtctcaccacagatctaacagcaaggacatccagaacctgagtgtaggcctgccccgggctgacgaaggtctccctgccaatgaaagcttcctaaatggaaaccttgctggagctagtcttagtccactgcacaccaaaacctaccaagcaagcagccagcctgggtctaccagcaaagatctcaccaacaacaacataccacaccttcttagcccaaaagaagccaagtcaaaaacagagtttgattttaatattgacccaaagccttcagaaggcccagggacaaagtacctcaagtcaaacagcagatctcagcagaaccgccactcattcatggaaagctctcaaagcaaagctgggacactgcagcccaatgaaaagcagagtcggcatagctatattgacacaattccccagtcctctaggagtccctcctacaggaccaaggccaaaagccatggggcactgagtgactccaagtctgtgagcaacctttctgaagccagggcccaaattgcggagcccagtaccagtaggtacttcccatctagctgcttagacttgaattctcccaccagcccaacccccaccagacacagtgacacgagaactttgctcagcccttctggaagaaataaccgaaatgagggaacgctggactcacgtcgaaccacaaccagacattctaagacgatggaggaattgaagctgccggagcacatggacagtagccattcccattcactgtctgcacctcacgaatctttttcttatggactgggctacaccagccccttttcttcccagcaacgtcctcataggcattctatgtatgtgacccgtgacaaagtgagagccaagggcttggatggaagcttgagcatagggcaagggatggcagctagagccaacagcctgcaactcttgtcaccccagcctggagaacagctccctccagagatgactgtggcaagatcttcggtcaaagagacctccagagaaggcacctcttccttccatacacgccagaagtctgagggtggagtgtatcatgacccacactctgatgatggcacagcccccaaagaaaatagacacctatacaatgatcctgtgccaaggagagttggtagcttttacagagtgccatctccacgtccagacaattctttccatgaaaataatgtgtcaactagagtttcttctctaccatcagagagcagttctggaaccaaccactcaaaaagacaaccagcattcgatccatggaaaagtcctgaaaatattagtcattcagagcaactcaaggaaaaagagaagcaaggatttttcaggtcaatgaaaaagaaaaagaagaaatctcaaacagtacccaattccgacagccctgatcttctgacgttgcagaaatccattcattctgctagcactccaagcagcagaccaaaggagtggcgccccgagaagatctcagatctgcagacccaaagccagccattaaaatcactgcgcaagttgttacatctctcttcggcctcaaatcacccggcttcctcagatccccgcttccagcccttaacagctcaacaaaccaaaaattccttctcagaaattcggattcaccccctgagccaggcctctggcgggagcagcaacatccggcaggaacccgcaccgaagggcaggccagccctccagctgccagacggtggatgtgatggcagaagacagagacaccattctggaccccaagatagacgcttcatgttaaggacgacagaacaacaaggagaatacttctgctgtggtgacccaaagaagcctcacactccgtgcgtcccaaaccgagcccttcatcgtccaatctccagtcctgctccctatccagtactccaggtccgaggcacttccatgtgcccgacactccaggtccgaggcactgatgctttcagctgcccaacccagcaatccgggttctctttcttcgtgagacacgttatgagggaagccctgattcacagggcccaggtaaaccaagctgcgctcctgacataccatgagaatgcggcactgacgggcaagtgacttctgcaagcctgcggctggtcccaatgccctgaatcacctctctcatggaagaaccaattaacaccaatgaatcaaccattaaaaa

SEQ ID NO: 516 - DNA, 3923 bp, Homo sapiens; identical to SEQ ID NO: 301

SEQ ID NO: 517 - DNA, 2650 bp, Homo sapiens; identical to SEQ ID NO: 299

SEQ ID NO: 518 - DNA, 3325 bp, Homo sapiens
cggagctgaagccggagccgggttggagtctgggcgggggccgggccggagcgggctccagagacatggggtcgaccgactccaagctgaacttccggaaggcggtgatccagctcaccaccaagacgcagcccgtggaagccaccgatgatgccttttgggaccagttctgggcagacacagccacctcggtgcaggatgtgtttgcactggtgccggcagcagagatccgggccgtgcgggaagagtcaccctccaacttggccaccctgtgctacaaggccgttgagaagctggtgcagggagctgagagtggctgccactcggagaaggagaagcagatcgtcctgaactgcagccggctgctcacccgcgtgctgccctacatctttgaggaccccgactggaggggcttcttctggtccacagtgcccggggcagggcgaggagggcagggagaagaggatgatgagcatgccaggcccctggccgagtccctgctcctggccattgctgacctgctcttctgcccggacttcacggttcagagccaccggaggagcactgtggactcggcagaggacgtccactccctggacagctgtgaatacatctgggaggctggtgtgggcttcgctcactccccccagcctaactacatccacgatatgaaccggatggagctgctgaaactgctgctgacatgcttctccgaggccatgtacctgcccccagctccggaaagtggcagcaccaacccatgggttcagttcttttgttccacggagaacagacatgccctgcccctcttcacctccctcctcaacaccgtgtgtgcctatgaccctgtgggctacgggatcccctacaaccacctgctcttctctgactaccgggaacccctggtggaggaggctgcccaggtgctcattgtcactttggaccacgacagtgccagcagtgccagccccactgtggacggcaccaccactggcaccgccatggatgatgccgatcctccaggccctgagaacctgtttgtgaactacctgtcccgcatccatcgtgaggaggacttccagttcatcctcaagggtatagcccggctgctgtccaaccccctgctccagacctacctgcctaactccaccaagaagatccagttccaccaggagctgctagttctcttctggaagctctgcgacttcaacaagaaattcctcttcttcgtgctgaagagcagcgacgtcctagacatccttgtccccatcctcttcttcctcaacgatgcccgggccgatcagtctcgggtgggcctgatgcacattggtgtcttcatcttgctgcttctgagcggggagcggaacttcggggtgcggctgaacaaaccctactcaatccgcgtgcccatggacatcccagtcttcacagggacccacgccgacctgctcattgtggtgttccacaagatcatcaccagcgggcaccagcggttgcagcccctcttcgactgcctgctcaccatcgtggtcaacgtgtccccctacctcaagagcctgtccatggtgaccgccaacaagttgctgcacctgctggaggccttctccaccacctggttcctcttctctgccgcccagaaccaccacctggtcttcttcctcctggaggtcttcaacaacatcatccagtaccagtttgatggcaactccaacctggtctacgccatcatccgcaagcgcagcatcttccaccagctggccaacctgcccacggacccgcccaccattcacaaggccctgcagcggcgccggcggacacctgagcccttgtctcgcaccggctcccaggagggcacctccatggagggctcccgccccgctgcccctgcagagccaggcaccctcaagaccagtctggtggctactccaggcattgacaagctgaccgagaagtcccaggtgtcagaggatggcaccttgcggtccctggaacctgagccccagcagagcttggaggatggcagcccggctaagggggagcccagccaggcatggagggagcagcggcgaccgtccacctcatcagccagtgggcagtggagcccaacgccagagtgggtcctctcctggaagtcgaagctgccgctgcagaccatcatgaggctgctgcaggtgctggttccgcaggtggagaagatctgcatcgacaagggcctgacggatgagtctgagatcctgcggttcctgcagcatggcaccctggtggggctgctgcccgtgccccaccccatcctcatccgcaagtaccaggccaactcgggcactgccatgtggttccgcacctacatgtggggcgtcatctatctgaggaatgtggacccccctgtctggtacgacaccgacgtgaagctgtttgagatacagcgggtgtgaggatgaagccgacgaggggctcagtctaggggaaggcagggccttggtccctgaggcttcccccatccaccattctgagctttaaattaccacgatcagggcctggaacaggcagagtggccctgagtgtcatgccctagagacccctgtggccaggacaatgtgaactggctcagatccccctcaacccctaggctggactcacaggagccccatctctggggctatgcccccaccagagaccactgcccccaacactcggactccctctttaagacctggctcagtgctggcccctcagtgcccacccactcctgtgctacccagccccagaggcagaagccaatgggtcactgtgccctaaggggtttgaccagggaaccacgggctgtcccttgaggtgcctggacagggtaagggggtgcttccagcctcctaacccaaagccagctgttccaggctccaggggaaaaaggtgtggccaggctgctcctcgaggaggctgggagctggccgactgcaaaagccagactggggcacctcccgtatccttggggcatggtgtggggtggtgagggtctcctgctatattctcctggatccgtggaaatagcctggctccctcttacccagtaatgaggggcagggaagggaactgggaggcagccgtttagtcctccctgccctgcccactgcctggatggggcgatgccacccctcatccttcacccagctctggcctctgggtcccaccacccagccccccgtgtcagaacaatctttgctctgtacaatcggcctctttacaataaaacctcctgctccaaaaaaaaaaaaaaaaaaaaaaaaaaaaaaaaaaaaaaaaaaaaaaaaaaaaaaaaaaaaaaaaaaaa

SEQ ID NO: 519 - DNA, 3396 bp, Homo sapiens
gacgaaatcggaagtgcccggagcagaggcgggaccagaacctagagggcctcgggattgcggaagtttggtggggagggtcggagctctggtggagagagtgttgtctaaaacaagttccggaagggaggctgcccttcgcggtccgagaaccaccggcctccccagtttgagggctgttaccccgtgcgcgcttcgacgttgctgctgttggctctcctcgcccctcgttcccttgggaaccgcctgggaactccgccatgtcatccacttcgcccaacctccagaaagcgatagatctggctagcaaagcagcgcaagaagacaaggctgggaactacgaagaagcccttcagctctatcagcatgctgtgcagtattttcttcatgtcgttaaatatgaagcacagggtgataaagccaagcaaagtatcagggcaaagtgtacagaatatcttgatagagcagaaaaactaaaggagtacctgaaaaataaagagaaaaaagcacagaagccagtgaaagaaggacagccgagtccagcagatgagaaggggaatgacagtgatggggaaggagaatctgatgatcctgaaaaaaagaaactacagaatcaacttcaaggtgccattgttatagaacgaccaaatgtgaaatggagtgacgttgctggacttgaaggagccaaagaagcactgaaagaggctgtgatactgcctattaaatttcctcatctttttacaggcaagagaacaccttggaggggaatcctattatttgggccgcctggaacaggaaagtcctacttagccaaagctgtagcaacagaagccaacaactcaacatttttttcaatatcttcctctgatcttgtttctaagtggctaggtgaaagtgaaaaactggttaagaatttattccaacttgccagagagaacaagccctccattatcttcattgatgaaattgattctctctgtggttcaagaagtgaaaatgaaagtgaagccgcacgtagaattaagacggagttcctagtgcaaatgcaaggggttggtgtagacaatgatggaattttggttctgggagctacaaatataccctgggttctggattctgccattaggcgaagatttgagaaacgaatttatattcccttgccggaaccccatgcccgagcagcaatgtttaaactgcacctagggaccactcagaacagtctcacggaagcagactttcgggaacttgggaggaaaacagatggttattcaggggcagatataagtatcattgtacgtgatgcccttatgcagcctgttaggaaagtacagtcagctactcattttaaaaaggttcgcggaccttcccgagctgatcctaaccatcttgtagatgatctgctaacaccttgctctccaggtgaccctggtgccattgaaatgacatggatggatgtccctggagataaacttttggagccagttgtttccatgtcggatatgttgcggtcactatctaacacaaaacctacagtcaatgaacatgacttgttgaaattaaagaagtttacagaagattttggtcaagaaggctaagccaaagacaaggaagatgcttaccatatgtattctttctttcatagatatttttgtctatttggatcgcattaattgtttccagtaaaactcttttaccacagggaaatacacatctcacttcagagttccattaggttttatattgtacttttcctccattacttattaaatactcctattaacaaaaggtacaaaataacaggttatgaggaaatgagcgatatatgaacggcataaaaacagaaattacccagtaaaaaggatgtcagaaattgacatacaaatatttacaatttttatgaatggtggtctttgcaaagagcatttatattttcttttttttttactaaaatgatatagggtttattttatattttcaaaaaaattgttaaacatcattcttatcaatgtaaaatttacgttattaaaaaattacaaatgatagaatctttactcagggatgggcaataaaacagcaaagagctttgtgattgggtttgaaagattttgaattatagacagtgctcttaatagtttttaataagttgatatttttttctgtgtagatttaaataatttctttaaaagcgtaagctttggctgggcatggtggcttatgcctgtaatcccagcactttgggaggctacgatgggtggatcacctgaggtcaggagttcaagaccagtctggccaacatggtgaaatgccgtctctactaaaaatacaaaaattagctgggcatgatggcgagtgtctgtaatcccagctactcaggaggctgaggcgggagaatcacttgaacctgggaggcagaggttgcagtgagctgagatcgcgctactgcattccagcctgggcgccgagatagcgccattgcactccagcctgggcgactgaataaaactctgtctcaaaaaaaaacaaaaacggtaagcttttatatttaattaactgatacctttcactgtgcaatctcaagaggaagattttctaaattagacattgtctttaccttaaagaagaaaattgtctatttcagtgtcttttttagcaagattgaccaaaacaggtggtaggtgtgtaatttttaactgtcatgaaatactgtaatgcgcacctttgctaataaggaaatggtctccctttgaattatgggaagtttcttgtctgtgatatggggtgtctgtgtacatatatgtatatttccttttttaatacaggataataatatggggtcttgtccttcaccttttaagttcagggaacagtttgtcctgaccacacatatgttatcagtgtaatgctttatgaagctttagaaatgagctcatgactcattaaaaaataataaacgatgctattttaatattttcaaataaataatctgaggatgtgtttcatactttagcatcaacgctgagttgtgccttgtagaattgcattgtctatacatgcaaaagactattaagttaggatgaactagattccctaattacagtgaaattctatcttgcaaatgctatagaataacttgcattttaaagtgtatttgcacattttacatatgctatgtggttgcctttgggttttctgtacagattgtttttgttattaaatggaaaaggcctgaattatgctcttatgtgaagtaaattgatataacctattgactgtattctgtgtattattctttattttgggaccttctgtgtaaaagaaaatattacctaaattggttagatacaaagaaatcattaaaattattaatgtatatatgaaaaaaaaaaaaaaaaaaaa

SEQ ID NO: 520 - DNA, 5298 bp, Homo sapiens
atacagagcagcgagcactgaaggcttccctctttccttaaacctgtcgggttgtgggctctctcttttcccctcttgctcctttcttttctttttttctgtttttttaaaccttccaaggcaagttcatggatactaagctgatgtgtttgttgttctttttctccctgcctccgctcctagtgagtaaccacactggccgcatcaaggtggtctttactccgagcatctgtaaagtgacctgcaccaagggcagctgtcagaacagctgtgagaaggggaacaccaccactctcattagtgagaatggtcatgctgccgacaccctgacggccacgaacttccgagtggtaatttgccatcttccatgtatgaatggtggccagtgcagttcaagggacaaatgtcagtgccctccaaatttcacaggaaaactttgtcagatcccagtccatggtgccagcgtgcctaaactttatcagcattcccagcagccaggcaaggcgttggggacgcatgtcatccattcaacacataccttgcctctgaccgtgactagccagcaaggagtcaaagtgaaatttcctcctaacatagtcaatatccatgtgaaacatcctcctgaagcttccgtccagatacatcaggtttcaagaattgatggcccaacaggccagaagacaaaagaagctcaaccaggccaatcccaagtctcgtaccaagggcttcctgtccagaagacccagaccatacattccacatactcccaccagcaggtcattcctcacgtctaccccgtggctgctaagacacagcttggccggtgcttccaggaaaccattgggtcacagtgtggcaaagcgctccctggcctttcaaagcaagaggactgctgtggaactgtgggtacctcctggggctttaacaaatgccagaaatgccccaagaaaccatcttatcatggatacaaccaaatgatggaatgcctaccgggttataagcgggttaacaacaccttttgccaagatattaatgaatgtcagctacaaggtgtatgccctaatggtgagtgtttgaataccatgggcagctatcgatgtacctgcaaaataggatttgggccggatcctaccttttcaagttgtgttcctgatccccctgtgatctcggaagagaaagggccctgttaccgacttgtcagttctggaagacagtgtatgcaccctctgtctgttcacctcaccaagcagctctgctgttgtagtgtgggcaaggcctggggcccacactgtgagaaatgtccccttccaggcacagctgcttttaaggaaatctgtcctggtggaatgggttatacggtttctggcgttcatagacgcaggccaatccatcaccatgtaggtaaaggacctgtatttgtcaagccaaagaacactcaacctgttgctaaaagtactcatcctccacctctcccagccaaggaagagccagtggaggccctgaccttctcccgggaacacgggccaggagtggcggagccagaagtggcaactgcaccccctgaaaaggaaataccttcattggatcaagagaaaaccaaacttgagcctggtcaaccccagctgtctccaggcatttccactattcatctgcatccacagtttccaggtatagtgattgaaaaaacatcacctcctgtgcctgttgaagtagctcctgaagcttctacgtctagtgccagccaagtgattgctcctactcaagtgacagaaatcaatgaatgtactgtgaaccctgatatctgtggagcaggacactgcattaacctaccagtgagatatacctgtatatgctacgagggctacaggttcagtgaacaacagaggaaatgtgtggatattgatgagtgtactcaggtccaacacctctgctcccagggccgctgtgaaaacaccgagggaagtttcttgtgcatttgcccagcaggatttatggccagtgaggagggtactaactgcatagatgttgacgaatgcctgaggccggacgtctgtggggaggggcactgtgtcaatactgtgggggccttccggtgtgaatactgtgacagcgggtaccgcatgactcagagaggccgttgtgaggatattgatgaatgtttgaatccaagcacttgtccagatgagcagtgtgtgaattctcctggatcttaccagtgcgttccctgcacagaaggattccgaggctggaatggacagtgccttgatgtggacgagtgcctggaaccaaacgtctgcgcaaatggtgattgttccaaccttgaaggctcctacatgtgttcatgccacaaaggctatacccggactccggaccacaagcactgtagagatattgatgaatgtcagcaagggaatctatgtgtaaacgggcagtgcaaaaataccgagggctccttcaggtgcacctgtggacaggggtaccagctgtcggcagctaaagaccagtgtgaagacattgatgaatgccagcaccgtcatctctgtgctcatgggcagtgcaggaacactgagggctcttttcaatgtgtgtgtgaccagggttacagagcatctgggcttggagaccactgtgaagatatcaatgaatgcttggaggacaagagtgtttgccagagaggagactgcattaatactgcagggtcctatgattgtacttgtccggatggatttcagctagatgacaataaaacatgtcaagatattaatgaatgtgaacatccagggctctgtggtccgcaaggggagtgcctaaacacagagggttctttccattgtgtctgccagcagggtttctcaatctctgcagatggccgtacgtgtgaagatattgatgaatgtgtaaacaacactgtttgtgacagtcacgggttttgtgacaatacagctggctccttccgctgcctctgttatcagggctttcaagccccacaggatgggcaagggtgtgtggatgtgaatgaatgtgaactgctcagtggggtgtgtggtgaagccttctgtgaaaacgtggaagggtccttcctgtgcgtgtgtgctgatgaaaaccaagagtacagccccatgactgggcagtgccgctcccggacctccacagatttagatgtagatgtagatcaacccaaagaagaaaagaaagaatgctactataatctcaatgacgccagtctctgtgataatgtgttggcccccaatgtcacgaaacaagaatgctgctgtacatcaggcgcgggatggggagataactgcgaaatcttcccctgcccggtcttgggaactgctgagttcactgaaatgtgtcccaaagggaaaggttttgtgcctgctggagaatcatcttctgaagctggtggtgagaactataaagatgcagatgaatgcctactttttggacaagaaatctgcaaaaatggtttctgtttgaacactcggcctgggtatgaatgctactgtaagcaagggacgtactatgatcctgtgaaactgcagtgctttgatatggatgaatgtcaagaccccagtagttgtattgatggccagtgtgttaatacagagggctcttacaactgcttctgtactcaccccatggtcctggatgcgtcagaaaaaagatgtatacgaccggctgagtcaaacgaacaaatagaagaaactgatgtctaccaagatttgtgctgggaacatctgagtgatgaatacgtgtgtagccggcctcttgtgggcaagcagacaacgtacactgagtgctgctgtctgtatggagaggcctggggcatgcagtgtgccctctgccccctgaaggattcagatgactatgctcagctgtgtaacatccccgtgacgggacgccggcagccatatggacgggacgccttggttgacttcagtgaacagtatactccagaagccgatccctacttcatccaagaccgttttctaaatagctttgaggagttacaggctgaggaatgcggcatcctcaatggatgtgaaaatggtcgctgtgtgagggtccaggaaggttacacctgcgattgctttgatgggtatcacttggatacggccaagatgacctgtgtcgatgtaaatgaatgcgatgagttgaacaaccggatgtctctctgcaagaatgccaagtgcattaacaccgatggttcctacaagtgtttgtgtctgccaggctacgtgccttctgacaagccaaactactgcactccgttgaataccgccttgaatttagagaaagacagtgacctggagtgaaacagaatctacataacctaagcccatatactctgcactgtgtaaaggaaaagggagaaatgtattatacttgagacattgcacctaccccggaaggctggaaatacagaaacagcatggagttgcaagtcctctgaagacaatgagaggatttaggatgagcccgataggtgtggcagaccaaatggacatttctctaaaaaaccagtatatatagtctgttcatatgtaaaattcaatggaagagaggtggaacagtgctgttattttaaacagaaggttgtattattatgttgttttgtttttttactattgcttgattaaatttggcatttaaatagtggtggaaatattttatataattttcattttttggttgtgcagttccttggctactgtttttcttttacttcagttttttaaaaatctcaaatgaaaaagtcttcgatacaatattgttaagctgtattataagtattgttacacagggttatgcaattcccggcctggagcatttttgaaattcaaattgtctgtcctgtggagcaggcagtgattttgttccaaaactttgtatacacatttggagaaaagtactttatattttcagtgttttgtctgattttaatgtccgttcttagccaagctgctagcaggtgttaattggatccctttccttcactgaaatggaagagtttataagcttacgttagtattgtaatatgtaaagtaagcccaacaaaaatttttaaaaatttgatgatccccaatatatctaccattgtatgttaaataaatcaccatttttgtagaaaaaattctacctgagagtaattgtcaatgagtacatgtgtataagttgtatcccactctccccacttttatcttttccagtggtcttctgttaatgtagtgtcttttacaagttaatcattaaatttgttagatcttgttatgggctaaaaaaaaaaaaaaaaaa

SEQ ID NO: 521 - DNA, 2015 bp, Homo sapiens
cccggaccgaggcaggacctcaccccgcgcgtgttccccgggcgcccctctgcgaaccccaggcccttcccaggtttgcgcgcgggggccatccagaccctgcggagagcgaggcccggagcgtcgccgaggtttgagggcgccggagaccgagggcctggcggccgaaggaaccgccccaagaagagcctctggcccgggggctgctggaacatgtgcggggggacacagtttgtttgacagttgccagactatgtttacgcttctggttctactcagccaactgcccacagttaccctggggtttcctcattgcgcaagaggtccaaaggcttctaagcatgcgggagaagaagtgtttacatcaaaagaagaagcaaactttttcatacatagacgccttctgtataatagatttgatctggagctcttcactcccggcaacctagaaagagagtgcaatgaagaactttgcaattatgaggaagccagagagatttttgtggatgaagataaaacgattgcattttggcaggaatattcagctaaaggaccaaccacaaaatcagatggcaacagagagaaaatagatgttatgggccttctgactggattaattgctgctggagtatttttggttatttttggattacttggctactatctttgtatcactaagtgtaataggctacaacatccatgctcttcagccgtctatgaaagggggaggcacactccctccatcattttcagaagacctgaggaggctgccttgtctccattgccgccttctgtggaggatgcaggattaccttcttatgaacaggcagtggcgctgaccagaaaacacagtgtttcaccaccaccaccatatcctgggcacacaaaaggatttagggtatttaaaaaatctatgtctctcccatctcactgactaccttgtcattttggtataagaaatttgtgttatttgataggccgggcatggtggctcatgcctgtaatcccagcactttgggaggccaggagttcgagaccagcctggccaacatggtgaaacccggtctctactaaaaattcaaaaattacctaggcgtcatggggcatgcctgtagtcccacctacttgggaggctgaagcaggagaattgctcgaacctgggaggcagaggttgcagtaagctgagatcacgccactgcattccagcctgggcgacagagcaagactccatctcaaaaataaaataaaaaaagaaagaaagaaaagaagaagaaaagagaagaaggagaaggagatgaaggaggaggaggaggagaaggagaagaagaagaagaagaagaccacaaaagacatgactatccaactttttatgacaaactgcaaggaataaaggaagaataagtccatgtactgtaccacagaagttctgtctgcatcttggacctgaacttgatcattatcagcttgataagagactttttgactctatatccttgcagttaagaagaaagcacttttttgtaatgtttgttttaatggttcaaaaaaaatctttcttataaagagcataggtagaattagtgaactctttggatcctttgtacagataaaggttatagatttcttgtgttgaatattaaaaaagcaaggatgtctaaccattaagattatccaaagtcaggctgggcgcagtggctcacgcctgtaatcccagcactttgggagggataggtgggcggatcacctgaggtcaggagtttgagaccagcctggccaacatggcaaaaccccgtctctacaaaaatacaaaagaaattagccagacatgatggcgggtgcctctaatcccagctactggggaggctgaggtgggagaatcgcttgaactcgggaggtggaggttgtagtgaggcgagattgtgccattgcactccaacctgggcgacagagtgagactccatctcaaaaaaaaaaaaaaaaaaaaaaaaaaaaaaaaaaaaaaaaaaaaaaaaaaa

SEQ ID NO: 522 - DNA, 6229 bp, Homo sapiens
cgccgtgggaagatggcggacggaaagggagacgccgccgctgtcgccggggctggggctgaggctccggcggtagcgggagccggagatggagtcgagactgagtccatggttcggggtcatcgccccgtatctccagcgccgggagcctcgggactgcggccgtgtctgtggcagctggagacagagctgagggagcaagaggtgtcggaggtctcatctttgaactactgccggagcttctgccagactttattgcaatatgcaagcaacaagaatgcatcagaacatattgtgtatcttctggaggtatatcgacttgccatccaaagctttgccagtgcacgtccatacttaactactgaatgtgaagatgtcctcttagtgcttggcagattagtactgagttgtttcgaattactgctttcagtgtctgaaagtgaactgccatgtgaagtctggctaccattccttcagtctctacaggagtcacatgatgcattattggaatttgggaataataacctacaaatattggttcatgttaccaaggaaggggtgtggaaaaacccagttcttcttaaaattctgtctcaacagccagtagaaacggaggaagtcaataaattgattgcacaagaaggaccttcctttctgcaaatgcgaataaaacatttgttgaaatctaactgcatcccccaggctactgctttatcaaaactatgtgcagaatctaaagaaatttcaaatgtgtcatcttttcagcaagcctatatcacatgtttatgttctatgctccctaatgaagatgctattaaggagattgcaaaggtcgactgcaaggaagtactagacatcatttgtaatctggaatctgaggggcaggataacacagcatttgttctttgtacgacttaccttacccagcagctccaaactgcaagtgtatattgttcttgggaactgactcttttttggagtaaactgcaaagaagaattgacccttctttagatacttttttggagcgctgtcgtcagtttggtgtcatagctaaaacgcagcagcatttattttgcctcattagagttatacaaactgaagcacaagatgctggtcttggggtgtcaattttactgtgtgtcagagctcttcaactcagatcaagtgaagatgaggaaatgaaggcatcagtttgtaaaacaattgcctgtcttttaccagaagatttagaagttagacgagcctgtcagcttacagaattcttaattgaacccagtttggatggatttaatatgttagaagaactatatttgcaaccagatcaaaaatttgatgaagaaaatgcaccggttccaaattctcttcgatgtgagctcttactagctttaaaagcccactggccttttgatcctgagttttgggactggaaaactttaaaacgacactgccaccaacttttaggacaagaagcctcagattctgatgatgatttaagtggctatgaaatgtccattaatgacacagatgttttagagtcatttctcagtgactatgatgagggtaaagaagataaacaatatagaagaagagatttgacagatcagcataaggagaaaagagacaaaaaacctattggctcttctgaaagatatcagaggtggcttcagtacaagtttttctgtttgttatgtaagcgggaatgtatagaggctagaattcttcatcattctaagatgcatatggaagatggaatttacacctgtccagtttgtattaaaaaatttaagagaaaagaaatgtttgttcctcatgtgatggagcatgttaaaatgccaccaagcagaagggaccgctctaaaaagaaattactgttaaaaggctctcaaaagggtatttgtcctaagagcccctctgcaatcccagagcaaaaccattcattgaatgaccaagccaaaggagagtctcatgaatacgtcacattcagcaaattagaagattgccacctgcaagacagagatttgtatccatgtcccggtacagactgttcccgtgtgtttaagcaatttaaatacttaagtgtgcatcttaaagctgaacaccaaaataatgatgaaaatgccaagcactacttggatatgaaaaatagaagagagaagtgtacttactgtcgacgacattttatgtctgcttttcaccttcgagagcacgaacaagtgcattgtgggcctcagccttatatgtgtgtatctatagattgctatgctaggtttggatcagtaaatgaactacttaaccataaacaaaagcatgacgatctgcgttacaaatgtgaattaaatggctgtaatattgttttcagtgacttgggacagctttaccaccatgaagcacaacactttagggatgcatcttacacatgcaacttccttggctgtaaaaagttctattactccaaaattgaataccagaatcacctctcaatgcataatgttgaaaattcaaatggagacataaagaaatcagtgaaacttgaggagtctgcaacaggtgaaaagcaagattgtattaatcagccccatctacttaaccaaactgataaatcacatttacctgaagatcttttctgtgcagaatcagctaattctcaaatagatacagaaactgcagaaaacctgaaagaaaacagtgacagtaattctagtgatcagttaagtcatagctcttcagcttcaatgaatgaagagctaattgacacactagatcactctgaaactatgcaggatgtattgttatctaatgagaaagtctttgggccctccagtttaaaagaaaaatgttccagtatggcagtttgttttgacgggactaagtttacctgtggttttgatggctgtggttccacatacaaaaatgcaagaggaatgcagaaacatttacggaaggttcatccataccatttcaagcccaaaaagataaagacgaaagatctgtttccctctttgggtaatgaacataatcagacaactgaaaagttggatgcagaacctaaaccctgctcagatacaaacagtgactccccagatgaaggtctagatcacaatattcacattaaatgtaaacgagaacatcaaggttattcctcagaatcctccatttgtgcttctaaaaggccctgtacagaggataccatgttggaacttctgttacgcttgaaacatttaagcttgaaaaactcaataacacatggatctttctcagggtcattgcaggggtacccatccagtggtgctaagtctcttcagtcagtttcatctatctcagaccttaattttcagaatcaagatgaaaacatgccaagtcagtaccttgcacagttggcggctaagccgtttttctgtgagcttcaaggatgcaaatatgaatttgtgaccagagaggctctgttaatgcattatcttaaaaagcataattattcaaaagaaaaagtccttcagttaaccatgttccaacatcggtattccccatttcagtgtcatatttgccaaaggtcatttacaagaaaaacacaccttaggattcattataaaaataaacatcaaattggcagtgacagagcaactcacaaactattagataatgaaaagtgtgatcatgaaggcccatgttcagtagataggttgaaaggtgattgttctgcagaacttggaggtgatcccagtagtaactctgagaaaccacactgtcatcctaaaaaggatgaatgtagttctgaaacagatttggaatcatcttgtgaagaaacagaaagtaaaacatctgacatttcatcaccaataggcagccatagagaagaacaagaaggaagagagggcagaggtagcaggcgaactgttgctaaaggaaatctgtgttatattttgaataaataccacaaaccattccattgtattcataaaacttgcaactcctcattcaccaatctaaaaggcttaattcgccattacagaactgtacatcagtacaacaaagaacagttatgtttggagaaagacaaagcaagaaccaaaagggaacttgtcaaatgtaaaaagatatttgcttgcaaatataaggaatgtaataaacgcttcctgtgttccaaagctcttgctaagcactgtagtgattctcataacctagaccatattgaagagcctaaagtactttccgaagctggatctgcagcaaggttttcttgtaaccagcctcagtgccctgctgttttttatacattcaacaagttgaagcaccacttgatggaacagcataatattgaaggggaaatacattcagattatgaaattcattgtgatcttaatggctgtggccagattttcacccatcgcagtaattactcacaacatgtatattaccgacataaagactattatgatgatttgtttagaagccagaaagtagcaaatgagagactactaaggagtgaaaaggtatgtcaaacagctgatactcaggggcatgaacatcagaccaccaggagatcatttaatgctaagtctaaaaaatgtggcttaatcaaagaaaagaaagccccaataagttttaaaaccagagctgaggccctccatatgtgtgtggagcactctgagctctctctgtacccctgcatggttcaaggatgcttatctgtggtgaagttggagagcagcattgtgaggcattacaaacgcactcatcagatgagtagtgcctatttagagcaacagatggagaatcttgttgtttgcgttaagtacggtaccaaaattaaggaggaacccccttctgaagcagatccctgtataaagaaagaagaaaatagaagctgtgaatcagagcgcacagaacacagccattccccgggtgacagtagtgcacccatccagaacactgattgctgtcattcaagtgaaagggatggaggtcagaaagggtgcatagaaagcagctcagtatttgatgcagatactctgctctacaggggaactttgaaatgtaatcatagttccaaaaccacttccctagaacagtgtaatatagttcagcctcctcctccttgtaaaatagaaaattccatacctaatcccaatgggactgaaagtgggacttatttcacaagtttccagctgcctttaccaaggatcaaagaatcagaaactaggcagcatagttcagggcaagaaaacactgtaaaaaatccaacccatgtcccaaaagagaattttaggaaacattcacagccccggtcatttgatttgaagacttacaaacctatgggatttgaatcttcatttctgaaatttattcaggaaagtgaagagaaagaagatgattttgatgattgggagccttcagagcacttaacattaagtaattcttcacagtccagtaatgatttaacagggaatgttgtggcaaataatatggtgaatgacagtgaacctgaagttgacatacctcattcttccagtgactctacaattcatgagaacctgactgcaatcccacctttaatagtagctgaaacaacaacagttccttccttggaaaacctgagggttgtattggacaaagcattaacagactgtggagagcttgccttaaaacagcttcattatcttcggccagtggtggttcttgaaagatctaagttttccacaccaattttagacttatttccaacaaaaaagacagatgagctttgtgtaggaagttcataagtagcaattttgttttagtaacagactggctccaacactgcaacatggggacatttgccaactcgaacaaaggctgagaagcagccacaccgttgtttagggtagaataggctgtgtatttacatgaatgtataatatctatgtcagcagtattggctgagtccattagctctccagttggtttaatgattgggtttatttttgtttgtttgtttattaaaaaaatggaactgtacacttgtttggtgctaattaatacatcaaaatatactggggcttcctttttcaaattaagtgtgcatgattgtatatggaacaaatactaaggtcccagggtgggagggctagggaaagggatatggagttcttacttgacttgaatgtgcacctgagggtgctttgtgtaatatattgtacactacagcatcttatattttttgagttgagtttcaataaattacaatttttcacc

SEQ ID NO: 523 - DNA, 3984 bp, Homo sapiens
taggaagaggcactgctgagggggcgcgaggggaacggaggccagagctgcgctgacagcagccatggcgagcggcagtggagacagcgtcacccgtcggagcgtggcatcacagtttttcactcaagaggaggggccgggcatcgatggcatgaccacctcagagagggtggtggatcttctgaaccaggcggcgctgatcaccaatgactcaaagatcacagtgctcaaacaggtccaggagctgatcatcaacaaagacccacactactggacaacttcctggatgagatcatcgcattccaagcagacaagtcaatcgaagtgcgaaaatttgtcatcggcttcatcgaggaggcatgcaagcgagacattgagttgctgctgaaactcattgcaaacctcaacatgctcttgagggacgagaatgtgaacgtggtgaagaaggctatcctcaccatgacccagctctacaaggtggccctgcagtggatggtaaagtcacgggtaattagcgagctacaggaggcctgctgggacatggtatctgccatggcgggggacatcatcctgctattggactctgacaatgacggcatccgcacccacgccatcaagtttgtggagggcctcattgtcaccctgtcaccccgcatggctgactcagagataccccgacgccaggagcatgatatcagcctggaccgcatccctcgtgaccacccctacatccagtacaacgtgctatgggaagagggcaaggcagccttggagcagctgcttaagttcatggtgcaccctgccatctcctccatcaacctgaccacagcgctgggctcccttgccaatatcgcccgccagagacccatgttcatgtctgaggtgatccaggcctatgaaactctgcatgccaacctgcccccgacgctggccaaatcgcaggtgagcagtgtgcgtaagaatctgaagctgcacctgttgagtgtgctgaagcacccggcttccttggagttccaggcccagatcaccaccctgctggtggacctgggcacacctcaggccgagatcgcccgcaacatgccgagcagcaaggacacccgcaagcggccccgcgatgactcggactccacactcaagaagatgaagctggagcccaacctgggggaggacgatgaggacaaagacttggagccaggcccgtcggggacctcgaaggcctcagcgcagatctccggccagtcagacacggacatcacagctgagttcctgcagcctctgctgacgcctgataatgtggctaatctggtcctcatcagcatggtgtacctacccgaggccatgccagcctccttccaggccatctacacccccgtggagtcagcaggcacggaagcccagatcaagcacctggctcggctcatggccacacagatgacagctgccggactgggaccaggtgtagagcagaccaaacagtgcaaggaggagcccaaggaggagaaggtggtgaagacagagagcgtcctgatcaagcggcgcctgtcagcccagggccaagccatctcggtggtgggttccctgagctccatgtcccccctggaggaagaggcaccgcaggccaagaggaggccagagcccattatccctgtcactcagccccggctggcaggcgctggtgggcgcaagaaaattttccgtctcagcgacgtgctgaagccccttaccgatgcccaggtggaagccatgaagctgggcgctgtgaagcggatcctgcgggctgagaaggctgtggcctgcagcggggcagcccaggtccgcataaagatcctggccagcctggtgacacagttcaactcgggcctgaaggcggaggtcctgtccttcatcctggaggatgtgcgggcccgcctggacctggccttcgcctggctctaccaggagtacaacgcctacctggccgcaggtgcctcgggctccctggacaagtatgaggactgcctcatccgcctgttgtctggcctgcaggagaaaccagaccagaaggatgggatcttcaccaaggttgtgctggaggcgccactcatcacagagagtgccctggaggtggtccgcaagtactgcgaggatgagagtcgcacctatctgggcatgtccacacttcgagacctgatcttcaagcgcccgtcccgccagttccagtacctgcatgtcctcctcgacctcagctcccatgagaaggacaaggtgcgctcccaggccctgctgttcatcaaacgcatgtatgagaaggagcagctgcgggagtatgtggagaaatttgccctcaactacctgcagctcctggtgcaccccaacccaccgtctgtgctgtttggagctgacaaggacacagaggtggcagcaccctggacggaggagacagtgaagcagtgtctgtacctctacctggccctcctgcctcagaaccacaagctgatccacgaactggcggccgtgtacactgaagccatcgccgacatcaagcggacggtgctgagggtcattgagcagccgatccgaggaatgggcatgaactccccggagctgctcctgctggtggaaaattgtcccaagggagcagagacactggtcacgagatgtctgcacagcctcacagacaaagtcccaccctccccagagctggtgaagcgggtccgggatctctaccacaagcgactgccagacgtccgcttcctcatcccggtgctcaatgggctggagaagaaagaggtgatccaggccctgcctaaactcatcaaactcaaccccatcgtggtgaaggaagtcttcaaccgcctgctgggcacccagcatggtgagggaaactcagccttgtccccgctgaaccctggagagctcctgatcgcattacacaacattgactccgtgaagtgcgacatgaaatccatcatcaaagccaccaacctgtgctttgcggagcggaacgtgtacacgtcagaggtgctggccgtggtgatgcagcagctgatggagcagagccccctgcccatgctgctcatgaggaccgtcatccagtccctgaccatgtacccccgcctggggggcttcgtcatgaacatcctgtcccgcctcatcatgaagcaggtgtggaagtaccccaaggtgtgggagggcttcatcaagtgctgccagcgcacaaagccccagagcttccaggtcatcctgcagctgccgccccagcagctgggagccgtctttgacaagtgcccagagctccgggagcccctgctggcccatgtccgctccttcaccccccaccagcaagctcacatccctaactccatcatgaccatcttggaggccagcggcaagcaggagccagaggccaaggaggcgcctgcggggcccttggaggaggatgatctggagcccctgaccttggccccggccccagcaccccggccccctcaggacctcatcggcctgcgactggcccaggagaaggccttaaagcggcagctggaggaggaacagaagctgaagccgggaggagtgggagccccctcctcttcctccccctctccctctccgtcggcccggccaggcccgcccccgtctgaggaagccatggatttccgggaggaggggcctgagtgcgagaccccgggcatcttcatcagcatggatgacgactcggggctgaccgaggccgcgctgttggactctagtctcgagggccccctacccaaggagacggcagcgggcgggctgaccttgaaggaggagcggagcccccagaccctcgcacctgttggagaagatgctatgaagactcccagcccggctgccgaggacgccagggaacccgaggccaaggggaacagctgacggggctcgagggggaaagggggtgggacagggactcggggctgggggacggggcggggcttgacctgcgggtgctttgccttaaaaagaaataaa

SEQ ID NO: 524 - DNA, 219 bp, Homo sapiens
acaagcagtacaagggcatcgtggactgcatcgtccgcatccccaaagatcagggcgtgctgtccttctggaggggcaacctggccaatgtcatccgctactcccccacgcaagccctcaatttcgccttcaaggataagtacaagcagatcttcctggggggcgtggacaagcacacgcagttctggaggtactttgcgggcaacctggcctccggcc

SEQ ID NO: 525 - DNA, 1772 bp, Homo sapiens
ggtggtggcagaggcgcctgcggttactggccgggccgacgggtcctgagtctccagagctcggtgaggcgtcccggaggcggcgatcacggttcttacatccccgcgtccccaggtttagcctgagcagggttgtggaaggccgggacccattgacagcacgatggtgacggagcaggaggtggatgccatcgggcagacgctggtggaccccaagcagcccctgcaggcccgcttccgggcgctgttcacgctgcgtgggctcggcggcccaggcgccattgcatggatcagccaggccttcgatgacgattccgccctgctcaagcacgagctggcctactgcctgggccagatgcaggatgcccgcgccatccccatgctggtggacgtgctgcaagacacccgtcaggagcccatggtgcgccatgaggcaggggaggccctgggggccatcggggacccggaagttctggagatcctgaagcagtattcctcggaccccgtcatcgaggtggccgagacctgccagctggccgtgcgcaggctggagtggctgcagcagcacggcggggagccggcggcgggaccctacctctccgtggaccctgccccgccggctgaggagcgtgacgtggggcgcctgcgggaggcgctgctggatgagtcccggccgctcttcgagcgataccgcgccatgttcgccctgcgcaacgcgggaggcgaggaggccgccctggcgctggccgagggtctgcactgtgggagcgccctcttccgccacgaggtcggctacgtcctgggacagctgcagcacgaggcggcggtgccccagctggcggccgccctggcccgatgcaccgagaaccccatggtgcggcacgagtgcgcggaggccctgggcgccattgcccggcccgcctgcctggccgcgctgcaggctcacgcggacgacccagagcgcgtggtgcgtgagagctgcgaggtggctctggacatgtatgagcacgagaccgggcgggccttccagtacgcggacggcctggagcagctgcgcggggccccctcctagggccccaccctcacccggagctcccggaggactcttgagggccgctcctcccccgcagagctttggcgtctaaaccgggtgtgtgtaaatcggtgtcatcgcttgtgtcttgctgggcgcacggttgctgtccccctcctccgtctgggaccgaggagctgccgttgtgctgtgactccctgagtcccctgactgctcctcggggcctggcgcagggctgtagcgtggaagtttccaggcttggggtgggactctgcgggaggctctgggatgcccggctcaggacaggggaggattgcgagggaagccaggggaggatcgcgagggaagccaggggaggatcgcgagggaagccaggggaggatcgcgagggaagccaggggaggatcgcgagggaagccaagggaggatcgcgaggggagccaggggaggatcgcgagggaagccaggggcagagctggggctctgggaagaggctgacgttatggtggcttcagcttcactaggaatgggacacagggtctgggggcctctgactcccccaccccgaggcctgggtagggacagggtggtggtccctgggtgggtcaggtagggcacaggggccagggagggacaagcagacctcagagcgctgcccagatggaatattaaattatttttgccaaaacaaaaaaaaaaaaaaaaaaaaaaaaaaaaa

SEQ ID NO: 526 - DNA, 5868 bp, Homo sapiens; identical to SEQ ID NO: 288

SEQ ID NO: 527 - DNA, 2712 bp, Homo sapiens; identical to SEQ ID NO: 302

SEQ ID NO: 528 - DNA, 2679 bp, Homo sapiens
ctcccgcgcgcgggctcaactttgtagagcgaggggccaacttggcagagcgcgcggccagctttgcagagagcgccctccagggactatgcgtgcggggacacgggtcgctttgggctcttccacccctgcggagcgcactaccccgagccaggggcggtgcaagccccgcccggccctacccagggcggctcctccctccgcagcgccgagacttttagtttcgctttcgctaaaggggccccagacccttgctgcggagcgacggagagagactgtgccagtcccagccgccctaccgccgtgggaacggcaggaagtggcacttggaaaagaacaccagctgcggtggtagcagtgggatttgtgcttcttatgttacccagatggcagatgatcagggctgtattgaagagcagggggttgaggattcagcaaatgaagattcagtggatgctaagccagaccggtcctcgtttgtaccgtccctcttcagtaagaagaagaaaaatgtcaccatgcgatccatcaagaccacccgggaccgagtgcctacatatcagtacaacatgaattttgaaaagctgggcaaatgcatcataataaacaacaagaactttgataaagtgacaggtatgggcgttcgaaacggaacagacaaagatgccgaggcgctcttcaagtgcttccgaagcctgggttttgacgtgattgtctataatgactgctcttgtgccaagatgcaagatctgcttaaaaaagcttctgaagaggaccatacaaatgccgcctgcttcgcctgcatcctcttaagccatggagaagaaaatgtaatttatgggaaagatggtgtcacaccaataaaggatttgacagcccactttaggggggatagatgcaaaacccttttagagaaacccaaactcttcttcattcaggcttgccgagggaccgagcttgatgatggcatccaggccgactcggggcccatcaatgacacagatgctaatcctcgatacaagatcccagtggaagctgacttcctcttcgcctattccacggttccaggctattactcgtggaggagcccaggaagaggctcctggtttgtgcaagccctctgctccatcctggaggagcacggaaaagacctggaaatcatgcagatcctcaccagggtgaatgacagagttgccaggcactttgagtctcagtctgatgacccacacttccatgagaagaagcagatcccctgtgtggtctccatgctcaccaaggaactctacttcagtcaatagccatatcaggggtacattctagctgagaagcaatgggtcactcattaatgaatcacatttttttatgctcttgaaatattcagaaattctccaggattttaatttcaggaaaatgtattgattcaacagggaagaaactttctggtgctgtcttttgttctctgaattttcagagactttttttataatgttattcatttggtgactgtgtaactttctcttaagattaattttctctttgtatgtctgttaccttgttaatagacttaatacatgcaacagaagtgacttctggagaaagctcatggctgtgtccactgcaattggtggtaacagtggtagagtcatgtttgcacttggcaaaaagaatcccaatgtttgacaaaacacagccaaggggatatttactgctctttattgcagaatgtgggtattgagtgtgatttgaatgatttttcattggcttagggcagattttcatgcaaaagttctcatatgagttagaggagaaaaagcttaatgattctgatatgtatccatcaggatccagtctggaaaacagaaaccattctaggtgtttcaacagagggagtttaatacaggaaattgacttacatagatgataaaagagaagccaaacagcaagaagctgttaccacacccagggctatgaggataatgggaagaggtttggtttcctgtgtccagtagtgggatcatccagaggagctggaaccatggtgggggctgcctagtgggagttaggaccaccaatggattgtggaaaatggagccatgacaagaacaaagccactgactgagatggagtgagctgagacagataagagaataccttggtctcacctatcctgccctcacatcttccaccagcaccttactgcccaggcctatctggaagccacctcaccaaggaccttggaagagcaagggacagtgaggcaggagaagaacaagaaatggatgtaagcctggcccataatgtgaacataagtaatcactaatgctcaacaatttatccattcaatcatttattcattgggttgtcagatagtctatgtatgtgtaaaacaatctgttttggctttatgtgcaaaatctgttatagctttaaaatatatctggaactttttagattattccaagccttattttgagtaaatatttgttacttttagttctataagtgaggaagagtttatggcaaagatttttggcactttgttttcaagatggtgttatcttttgaattcttgataaatgactgtttttttctgcctaatagtaactggttaaaaaacaaatgttcatatttattgattaaaaatgtggttgcttaattcctaaaaaaaaaaaaaaaaaa

SEQ ID NO: 529 - DNA, 1892 bp, Homo sapiens; identical to SEQ ID NO: 298

SEQ ID NO: 530 - DNA, 2251 bp, Homo sapiens
gacgtcacggtcactgacagcgtgagcccgcggcggctgctgccatggtggctggcggccgggtaagggtctgagtggatctcctgccaggccagagcgccttcgggggccgcggcggaaggccaggagtttgcagccagggcgccgggtttgtggtctgcagtgtcgtgaggctgaggtgcagcatgtctagactgggagccctgggtggtgcccgtgccgggctgggactgttgctgggtaccgccgccggccttggattcctgtgcctcctttacagccagcgatggaaacggacccagcgtcatggccgcagccagagcctgcccaactccctggactatacgcagacttcagatcccggacgccacgtgatgctcctgcgggctgtcccaggtggggctggagatgcctcagtgctgcccagccttccacgggaaggacaggagaaggtgctggaccgcctggactttgtgctgaccagccttgtggcgctgcggcgggaggtggaggagctgagaagcagcctgcgagggcttgcgggggagattgttggggaggtccgatgccacatggaagagaaccagagagtggctcggcggcgaaggtttccgtttgtccgggagaggagtgactccactggctccagctctgtctacttcacggcctcctcgggagccacgttcacagatgctgagagtgaagggggttacacaacagccaatgcggagtctgacaatgagcgggactctgacaaagaaagtgaggacggggaagatgaagtgagctgtgagactgtgaagatggggagaaaggattctcttgacttggaggaagaggcagcttcaggtgcctccagtgccctggaggctggaggttcctcaggcttggaggatgtgctgcccctcctgcagcaggccgacgagctgcacaggggtgatgagcaaggcaagcgggagggcttccagctgctgctcaacaacaagctggtgtatggaagccggcaggactttctctggcgcctggcccgagcctacagtgacatgtgtgagctcactgaggaggtgagcgagaagaagtcatatgccctagatggaaaagaagaagcagaggctgctctggagaagggggatgagagtgctgactgtcacctgtggtatgcggtgctttgtggtcagctggctgagcatgagagcatccagaggcgcatccagagtggctttagcttcaaggagcatgtggacaaagccattgctctccagccagaaaaccccatggctcactttcttcttggcaggtggtgctatcaggtctctcacctgagctggctagaaaaaaaaactgctacagccttgcttgaaagccctctcagtgccactgtggaagatgccctccagagcttcctaaaggctgaagaactacagccaggattttccaaagcaggaagggtatatatttccaagtgctacagagaactagggaaaaactctgaagctagatggtggatgaagttggccctggagctgccagatgtcacgaaggaggatttggctatccagaaggacctggaagaactggaagtcattttacgagactaaccacgtttcactggccttcatgacttgatgccactatttaaggtgggggggcggggaggcttttttccttagaccttgctgagatcaggaaaccacacaaatctgtctcctgggtctgactgctacccactaccactccccattagttaatttattctaacctctaacctaatctagaattggggcagtactcatggcttccgtttctgttgttctctcccttgagtaatctcttaaaaaaatcaagattcacacctgccccaggattacacatgggtagagcctgcaagacctgagaccttccaattgctggtgaggtggatgaacttcaaagctataggaacaaagcacataacttgtcactttaatctttttcactgactaataggactcagtacatatagtcttaagatcataccttacctaccaaggtaaaaagagggatcagagtggcccacagacattgctttcttatcacctatcatgtgaattctacctgtattccagggctggaccacttgataacttccagtgtcctggcagcttttggaatgacagcagtggtatggggtttatgatgctataaaacaatgtctgaaaagttgcctagaatatattttgttacaaacttgaaataaaccaaatttgatgtt

SEQ ID NO: 531 - DNA, 2395 bp, Homo sapiens; identical to SEQ ID NO: 292

SEQ ID NO: 532 - DNA, 2728 bp, Homo sapiens; identical to SEQ ID NO: 475

SEQ ID NO: 533 - protein, 388 aa, Homo sapiens
MKWMVVVLVCLQLLEAAVVKVPLKKFKSIRETMKEKGLLGEFLRTHKYDPAWKYRFGDLSVTYEPMAYMDAAYFGEISIGTPPQNFLVLFDTGSSNLWVPSVYCQSQACTSHSRFNPSESSTYSTNGQTFSLQYGSGSLTGFFGYDTLTVQSIQVPNQEFGLSENEPGTNFVYAQFDGIMGLAYPALSVDEATTAMQGMVQEGALTSPVFSVYLSNQQGSSGGAVVFGGVDSSLYTGQIYWAPVTQELYWQIGIEEFLIGGQASGWCSEGCQAIVDTGTSLLTVPQQYMSALLQATGAQEDEYGQFLVNCNSIQNLPSLTFIINGVEFPLPPSSYILSNNGYCTVGVEPTYLSSQNGQPLWILGDVFLRSYYSVYDLGNNRVGFATAA

SEQ ID NO: 534 - protein, 873 aa, Homo sapiens
MGTSALWALWLLLALCWAPRESGATGTGRKAKCEPSQFQCTNGRCITLLWKCDGDEDCVDGSDEKNCVKKTCAESDFVCNNGQCVPSRWKCDGDPDCEDGSDESPEQCHMRTCRIHEISCGAHSTQCIPVSWRCDGENDCDSGEDEENCGNITCSPDEFTCSSGRCISRNFVCNGQDDCSDGSDELDCAPPTCGAHEFQCSTSSCIPISWVCDDDADCSDQSDESLEQCGRQPVIHTKCPASEIQCGSGECIHKKWRCDGDPDCKDGSDEVNCPSRTCRPDQFECEDGSCIHGSRQCNGIRDCVDGSDEVNCKNVNQCLGPGKFKCRSGECIDISKVCNQEQDCRDWSDEPLKECHINECLVNNGGCSHICKDLVIGYECDCAAGFELIDRKTCGDIDECQNPGICSQICINLKGGYKCECSRGYQMDLATGVCKAVGKEPSLIFTNRRDIRKIGLERKEYIQLVEQLRNTVALDADIAAQKLFWADLSQKAIFSASIDDKVGRHVKMIDNVYNPAAIAVDWVYKTIYWTDAASKTISVATLDGTKRKFLFNSDLREPASIAVDPLSGFVYWSDWGEPAKIEKAGMNGFDRRPLVTADIQWPNGITLDLIKSRLYWLDSKLHMLSSVDLNGQDRRIVLKSLEFLAHPLALTIFEDRVYWIDGENEAVYGANKFTGSELATLVNNLNDAQDIIVYHELVQPSGKNWCEEDMENGGCEYLCLPAPQINDHSPKYTCSCPSGYNVEENGRDCQSTATTVTYSETKDTNTTEISATSGLVPGGINVTTAVSEVSVPPKGTSAAWAILPLLLLVMAAVGGYLMWRNWQHKNMKSMNFDNPVYLKTTEEDLSIDIGRHSASVGHTYPAISVVSTDDDLA

SEQ ID NO: 535 - protein, 386 aa, Homo sapiens
MKDCSNGCSAECTGEGGSKEVVGTFKAKDLIVTPATILKEKPDPNNLVFGTVFTDHMLTVEWSSEFGWEKPHIKPLQNLSLHPGSSALHYAVELFEGLKAFRGVDNKIRLFQPNLNMDRMYRSAVRATLPVFDKEELLECIQQLVKLDQEWVPYSTSASLYIRPTFIGTEPSLGVKKPTKALLFVLLSPVGPYFSSGTFNPVSLWANPKYVRAWKGGTGDCKMGGNYGSSLFAQCEAVDNGCQQVLWLYGEDHQITEVGTMNLFLYWINEDGEEELATPPLDGIILPGVTRRCILDLAHQWGEFKVSERYLTMDDLTTALEGNRVREMFGSGTACVVCPVSDILYKGETIHIPTMENGPKLASRILSKLTDIQYGREESDWTIVLS

SEQ ID NO: 536 - protein, 399 aa, Homo sapiens
MPQLSGGGGGGGGDPELCATDEMIPFKDEGDPQKEKIFAEISHPEEEGDLADIKSSLVNESEIIPASNGHEVARQAQTSQEPYHDKAREHPDDGKHPDGGLYNKGPSYSSYSGYIMMPNMNNDPYMSNGSLSPPIPRTSNKVPVVQPSHAVHPLTPLITYSDEHFSPGSHPSHIPSDVNSKQGMSRHPPAPDIPTFYPLSPGGVGQITPPLGWQGQPVYPITGGFRQPYPSSLSVDTSMSRFSHHMIPGPPGPHTTGIPHPAIVTPQVKQEHPHTDSDLMHVKPQHEQRKEQEPKRPHIKKPLNAFMLYMKEMRANVVAECTLKESAAINQILGRRWHALSREEQAKYYELARKERQLHMQLYPGWSARDNYGKKKKRKREKLQESASGTGPRMTAAYI

SEQ ID NO: 537 - protein, 967 aa, Homo sapiens
MQRAVPEGFGRRKLGSDMGNAERAPGSRSFGPVPTLLLLAAALLAVSDALGRPSEEDEELVVPELERAPGHGTTRLRLHAFDQQLDLELRPDSSFLAPGFTLQNVGRKSGSETPLPETDLAHCFYSGTVNGDPSSAAALSLCEGVRGAFYLLGEAYFIQPLPAASERLATAAPGEKPPAPLQFHLLRRNRQGDVGGTCGVVDDEPRPTGKAETEDEDEGTEGEDEGAQWSPQDPALQGVGQPTGTGSIRKKRFVSSHRYVETMLVADQSMAEFHGSGLKHYLLTLFSVAARLYKHPSIRNSVSLVVVKILVIHDEQKGPEVTSNAALTLRNFCNWQKQHNPPSDRDAEHYDTAILFTRQDLCGSQTCDTLGMADVGTVCDPSRSCSVIEDDGLQAAFTTAHELGHVFNMPHDDAKQCASLNGVNQDSHMMASMLSNLDHSQPWSPCSAYMITSFLDNGHGECLMDKPQNPIQLPGDLPGTSYDANRQCQFTFGEDSKHCPDAASTCSTLWCTGTSGGVLVCQTKHFPWADGTSCGEGKWCINGKCVNKTDRKHFDTPFHGSWGMWGPWGDCSRTCGGGVQYTMRECDNPVPKNGGKYCEGKRVRYRSCNLEDCPDNNGKTFREEQCEAHNEFSKASFGSGPAVEWIPKYAGVSPKDRCKLICQAKGIGYFFVLQPKVVDGTPCSPDSTSVCVQGQCVKAGCDRIIDSKKKFDKCGVCGGNGSTCKKISGSVTSAKPGYHDIITIPTGATNIEVKQRNQRGSRNNGSFLAIKAADGTYILNGDYTLSTLEQDIMYKGVVLRYSGSSAALERIRSFSPLKEPLTIQVLTVGNALRPKIKYTYFVKKKKESFNAIPTFSAWVIEEWGECSKSCELGWQRRLVECRDINGQPASECAKEVKPASTRPCADHPCPQWQLGEWSSCSKTCGKGYKKRSLKCLSHDGGVLSHESCDPLKKPKHFIDFCTMAECS

SEQ ID NO: 538 - protein, 167 aa, Homo sapiens
MASPRTVTIVALSVALGLFFVFMGTIKLTPRLSKDAYSEMKRAYKSYVRALPLLKKMGINSILLRKSIGALEVACGIVMTLVPGRPKDVANFFLLLLVLAVLFFHQLVGDPLKRYAHALVFGILLTCRLLIARKPEDRSSEKKPLPGNAEEQPSLYEKAPQGKVKVS

SEQ ID NO: 539 - protein, 314 aa, Homo sapiens
MSRVPAFLSAAEVEEHLRSSSLLIPPLETALANFSSGPEGGVMQPVRTVVPVTKHRGYLGVMPAYSAAEDALTTKLVTFYEDRGITSVVPSHQATVLLFEPSNGTLLAVMDGNVITAKRTAAVSAIATKFLKPPSSEVLCILGAGVQAYSHYEIFTEQFSFKEVRIWNRTKENAEKFADTVQGEVRVCSSVQEAVAGADVIITVTLATEPILFGEWVKPGAHINAVGASRPDWRELDDELMKEAVLYVDSQEAALKESGDVLLSGAEIFAELGEVIKGVKPAHCEKTTVFKSLGMAVEDTVAAKLIYDSWSSGK

SEQ ID NO: 540 - protein, 611 aa, Homo sapiens
MSIHIVALGNEGDTFHQDNQPSGLIRTYLGRSPLVSGDESSLLLNAASTVARPVFTEYQASAFGNVKLVVHDCPVWDIFDSDWYTSRNLIGGADIIVIKYNVNDKFSFHEVKDNYIPVIKRALNSVPVIIAAVGTRQNEELPCTCPLCTSDRGSCVSTTEGIQLAKELGATYLELHSLDDFYIGKYFGGVLEYFMIQALNQKTSEKMKKRKMSNSFHGIRPPQLEQPEKMPVLKAEASHYNSDLNNLLFCCQCVDVVFYNPDLKKVVEAHKIVLCAVSHVFMLLFNVKSPTDIQDSSIIRTTQDLFAINRDTAFPGASHESSGNPPLRVIVKDALFCSCLSDILRFIYSGAFQWEELEEDIRKKLKDSGDVSNVIEKVKCILKTPGKINCLRNCKTYQARKPLWFYNTSLKFFLNKPMLADVVFEIQGTTVPAHRAILVARCEVMAAMFNGNYMEAKSVLIPVYGVSKETFLSFLEYLYTDSCCPAGIFQAMCLLICAEMYQVSRLQHICELFIITQLQSMPSRELASMNLDIVDLLKKAKFHHSDCLSTWLLHFIATNYLIFSQKPEFQDLSVEERSFVEKHRWPSNMYLKQLAEYRKYIHSRKCRCLVM

SEQ ID NO: 541 - protein, 525 aa, Homo sapiens
MALERLCSVLKVLLITVLVVEGIAVAQKTQDGQNIGIKHIPATQCGIWVRTSNGGHFASPNYPDSYPPNKECIYILEAAPRQRIELTFDEHYYIEPSFECRFDHLEVRDGPFGFSPLIDRYCGVKSPPLIRSTGRFMWIKFSSDEELEGLGFRAKYSFIPDPDFTYLGGILNPIPDCQFELSGADGIVRSSQVEQEEKTKPGQAVDCIWTIKATPKAKIYLRFLDYQMEHSNECKRNFVAVYDGSSSIENLKAKFCSTVANDVMLKTGIGVIRMWADEGSRLSRFRMLFTSFVEPPCTSSTFFCHSNMCINNSLVCNGVQNCAYPWDENHCKEKKKAGVFEQITKTHGTIIGITSGIVLVLLIISILVQVKQPRKKVMACKTAFNKTGFQEVFDPPHYELFSLRDKEISADLADLSEELDNYQKMRRSSTASRCIHDHHCGSQASSVKQSRTNLSSMELPFRNDFAQPQPMKTFNSTFKKSSYTFKQGHECPEQALEDRVMEEIPCEIYVRGREDSAQASISIDF

SEQ ID NO: 542 - protein, 451 aa, Homo sapiens
MPREIITLQLGQCGNQIGFEFWKQLCAEHGISPEGIVEEFATEGTDRKDVFFYQADDEHYIPRAVLLDLEPRVIHSILNSPYAKLYNPENIYLSEHGGGAGNNWASGFSQGEKIHEDIFDIIDREADGSDSLEGFVLCHSIAGGTGSGLGSYLLERLNDRYPKKLVQTYSVFPYQDEMSDVVVQPYNSLLTLKRLTQNADCVVVLDNTALNRIATDRLHIQNPSFSQINQLVSTIMSASTTTLRYPGYMNNDLIGLIASLIPTPRLHFLMTGYTPLTTDQSVASVRKTTVLDVMRRLLQPKNVMVSTGRDRQTNHCYIAILNIIQGEVDPTQVHKSLQRIRERKLANFIPWGPASIQVALSRKSPYLPSAHRVSGLMMANHTSISSLFESSCQQFDKLRKRDAFLEQFRKEDMFKDNFDEMDRSREVVQELIDEYHAATQPDYISWGTQEQ

SEQ ID NO: 543 - protein, 458 aa, Homo sapiens
MTKYPDNLSDSLFSGDEENAGTEEIKNEINGNWISASSINEARINAKAKRRLRKNSSRDSGRGDSVSDSGSDALRSGLTVPTSPKGRLLDRRSRSGKGRGLPKKGGAGGKGVWGTPGQVYDVEEVDVKDPNYDDDQENCVYETVVLPLDERAFEKTLTPIIQEYFEHGDTNEVAEMLRDLNLGEMKSGVPVLAVSLALEGKASHREMTSKLLSDLCGTVMSTTDVEKSFDKLLKDLPELALDTPRAPQLVGQFIARAVGDGILCNTYIDSYKGTVDCVQARAALDKATVLLSMSKGGKRKDSVWGSGGGQQSVNHLVKEIDMLLKEYLLSGDISEAEHCLKELEVPHFHHELVYEAIIMVLESTGESTFKMILDLLKSLWKSSTITVDQMKRGYERIYNEIPDINLDVPHSYSVLERFVEECFQAGIISKQLRDLCPSRGRKRFVSEGDGGRLKPESY

SEQ ID NO: 544 - protein, 527 aa, Homo sapiens
MADSRDPASDQMQHWKEQRAAQKADVLTTGAGNPVGDKLNVITVGPRGPLLVQDVVFTDEMAHFDRERIPERVVHAKGAGAFGYFEVTHDITKYSKAKVFEHIGKKTPIAVRFSTVAGESGSADTVRDPRGFAVKFYTEDGNWDLVGNNTPIFFIRDPILFPSFIHSQKRNPQTHLKDPDMVWDFWSLRPESLHQVSFLFSDRGIPDGHRHMNGYGSHTFKLVNANGEAVYCKFHYKTDQGIKNLSVEDAARLSQEDPDYGIRDLFNAIATGKYPSWTFYIQVMTFNQAETFPFNPFDLTKVWPHKDYPLIPVGKLVLNRNPVNYFAEVEQIAFDPSNMPPGIEASPDKMLQGRLFAYPDTHRHRLGPNYLHIPVNCPYRARVANYQRDGPMCMQDNQGGAPNYYPNSFGAPEQQPSALEHSIQYSGEVRRFNTANDDNVTQVRAFYVNVLNEEQRKRLCENIAGHLKDAQIFIQKKAVKNFTEVHPDYGSHIQALLDKYNAEKPKNAIHTFVQSGSHLAAREKANL

SEQ ID NO: 545 - protein, 219 aa, Homo sapiens
MESQEPTESSQNGKQYIISEELISEGKWVKLEKTTYMDPTGKTRTWESVKRTTRKEQTADGVAVIPVLQRTLHYECIVLVKQFRPPMGGYCIEFPAGLIDDGETPEAAALRELEEETGYKGDIAECSPAVCMDPGLSNCTIHIVTVTINGDDAENARPKPKPGDGEFVEVISLPKNDLLQRLDALVAEEHLTVDARVYSYALALKHANAKPFEVPFLKF

SEQ ID NO: 546 - protein, 147 aa, Homo sapiens
MVMGLGVLLLVFVLGLGLTPPTLAQDNSRYTHFLTQHYDAKPQGRDDRYCESIMRRRGLTSPCKDINTFIHGNKRSIKAICENKNGNPHRENLRISKSSFQVTTCKLHGGSPWPPCQYRATAGFRNVVVACENGLPVHLDQSIFRRP

SEQ ID NO: 547 - protein, 327 aa, Homo sapiens
MALVHKLLRGTYFLRKFSKPTSALYPFLGIRFAEYSSSLQKPVASPGKASSQRKTEGDLQGDHQKEVALDITSSEEKPDVSFDKAIRDEAIYHFRLLKDEIVDHWRGPEGHPLHEVLLEQAKVVWQFRGKEDLDKWTVTSDKTIGGRSEVFLKMGKNNQSALLYGTLSSEAPQDGESTRSGYCAMISRIPRGAFERKMSYDWSQFNTLYLRVRGDGRPWMVNIKEDTDFFQRTNQMYSYFMFTRGGPYWQEVKIPFSKFFFSNRGRIRDVQHELPLDKISSIGFTLADKVDGPFFLEIDFIGVFTDPAHTEEFAYENSPELNPRLFK

SEQ ID NO: 548 - protein, 977 aa, Homo sapiens
MERQKRKADIEKGLQFIQSTLPLKQEEYEAFLLKLVQNLFAEGNDLFREKDYKQALVQYMEGLNVADYAASDQVALPRELLCKLHVNRAACYFTMGLYEKALEDSEKALGLDSESIRALFRKARALNELGRHKEAYECSSRCSLALPHDESVTQLGQELAQKLGLRVRKAYKRPQELETFSLLSNGTAAGVADQGTSNGLGSIDDIETDCYVDPRGSPALLPSTPTMPLFPHVLDLLAPLDSSRTLPSTDSLDDFSDGDVFGPELDTLLDSLSLVQGGLSGSGVPSELPQLIPVFPGGTPLLPPVVGGSIPVSSPLPPASFGLVMDPSKKLAASVLDALDPPGPTLDPLDLLPYSETRLDALDSFGSTRGSLDKPDSFMEETNSQDHRPPSGAQKPAPSPEPCMPNTALLIKNPLAATHEFKQACQLCYPKTGPRAGDYTYREGLEHKCKRDILLGRLRSSEDQTWKRIRPRPTKTSFVGSYYLCKDMINKQDCKYGDNCTFAYHQEEIDVWTEERKGTLNRDLLFDPLGGVKRGSLTIAKLLKEHQGIFTFLCEICFDSKPRIISKGTKDSPSVCSNLAAKHSFYNNKCLVHIVRSTSLKYSKIRQFQEHFQFDVCRHEVRYGCLREDSCHFAHSFIELKVWLLQQYSGMTHEDIVQESKKYWQQMEAHAGKASSSMGAPRTHGPSTFDLQMKFVCGQCWRNGQVVEPDKDLKYCSAKARHCWTKERRVLLVMSKAKRKWVSVRPLPSIRNFPQQYDLCIHAQNGRKCQYVGNCSFAHSPEERDMWTFMKENKILDMQQTYDMWLKKHNPGKPGEGTPISSREGEKQIQMPTDYADIMMGYHCWLCGKNSNSKKQWQQHIQSEKHKEKVFTSDSDASGWAFRFPMGEFRLCDRLQKGKACPDGDKCRCAHGQEELNEWLDRREVLKQKLAKARKDMLLCPRDDDFGKYNFLLQEDGDLAGATPEAPAAAATATTGE

SEQ ID NO: 549 - protein, 258 aa, Homo sapiens
MTPPKLRASLSPSLLLLLSGCLLAAARREKGAASNVAEPVPGPTGGSSGRFLSPEQHACSWQLLLPAPEAAAGSELALRCQSPDGARHQCAYRGHPERCAAYAARRAHFWKQVLGGLRKKRRPCHDPAPLQARLCAGKKGHGAELRLVPRASPPARPTVAGFAGESKPRARNRGRTRERASGPAAGTPPPQSAPPKENPSERKTNVGKRKAALVPNEERPMGTGPDPDGLDGNAELTETYCAEKWHSLCNFFVNFWNG

SEQ ID NO: 550 - protein, 409 aa, Homo sapiens
MQRLAMDLRMLSRELSLYLEHQVRVGFFGSGVGLSLILGFSVAYAFYYLSSIAKKPQLVTGGESFSRFLQDHCPVVTETYYPTVWCWEGRGQTLLRPFITSKPPVQYRNELIKTADGGQISLDWFDNDNSTCYMDASTRPTILLLPGLTGTSKESYILHMIHLSEELGYRCVVFNNRGVAGENLLTPRTYCCANTEDLETVIHHVHSLYPSAPFLAAGVSMGGMLLLNYLGKIGSKTPLMAAATFSVGWNTFACSESLEKPLNWLLFNYYLTTCLQSSVNKHRHMFVKQVDMDHVMKAKSIREFDKRFTSVMFGYQTIDDYYTDASPSPRLKSVGIPVLCLNSVDDVFSPSHAIPIETAKQNPNVALVLTSYGGHIGFLEGIWPRQSTYMDRVFKQFVQAMVEHGHELS

SEQ ID NO: 551 - protein, 366 aa, Homo sapiens
MASMAAVLTWALALLSAFSATQARKGFWDYFSQTSGDKGRVEQIHQQKMAREPATLKDSLEQDLNNMNKFLEKLRPLSGSEAPRLPQDPVGMRRQLQEELEEVKARLQPYMAEAHELVGWNLEGLRQQLKPYTMDLMEQVALRVQELQEQLRVVGEDTKAQLLGGVDEAWALLQGLQSRVVHHTGRFKELFHPYAESLVSGIGRHVQELHRSVAPHAPASPARLSRCVQVLSRKLTLKAKALHARIQQNLDQLREELSRAFAGTGTEEGAGPDPQMLSEEVRQRLQAFRQDTYLQIAAFTRAIDQETEEVQQQLAPPPPGHSAFAPEFQQTDSGKVLSKLQARLDDLWEDITHSLHDQGHSHLGDP

SEQ ID NO: 552 - protein, 518 aa, Homo sapiens
MDQTPPARPEYLVSGIRTPPVRRNSKLATLGRIFKPWKWRKKKNEKLKQTTSALEKKMAGRQGREELIKKGLLEMMEQDAESKTCNPDGGPRSVQSEPPTPKSETLTSEDAQPGSPLATGTDQVSLDKPLSSAAHLDDAAKMPSASSGEEADAGSLLPTTNELSQALAGADSLDSPPRPLERSVGQLPSPPLLPTPPPKASSKTTKNVTGQATLFQASSMKSADPSLRGQLSTPTGSPHLTTVHRPLPPSRVIEELHRALATKHRQDSFQGRESKGSPKKRLDVRLSRTSSVERGKEREEAWSFDGALENKRTAAKESEENKENLIINSELKDDLLLYQDEEALNDSIISGTLPRKCKKELLAVKLRNRPSKQELEDRNIFPRRTDEERQEIRQQIEMKLSKRLSQRPAVEELERRNILKQRNDQTEQEERREIKQRLTRKLNQRPTVDELRDRKILIRFSDYVEVAKAQDYDRRADKPWTRLSAADKAAIRKELNEYKSNEMEVHASSKHLTRFHRP

SEQ ID NO: 553 - protein, 335 aa, Homo sapiens
MASASSSRAGVALPFEKSQLTLKVVSAKPKVHNRQPRINSYVEVAVDGLPSETKKTGKRIGSSELLWNEIIILNVTAQSHLDLKVWSCHTLRNELLGTASVNLSNVLKNNGGKMENMQLTLNLQTENKGSVVSGGELTIFLDGPTVDLGNVPNGSALTDGSQLPSRDSSGTAVAPENRHQPPSTNCFGGRSRTHRHSGASARTTPATGEQSPGARSRHRQPVKNSGHSGLANGTVNDEPTTATDPEEPSVVGVTSPPAAPLSVTPNPNTTSLPAPATPAEGEEPSTSGTQQLPAAAQAPDALPAGWEQRELPNGRVYYVDHNTKTTTWERPLPPG

SEQ ID NO: 554 - protein, 544 aa, Homo sapiens
MATAPGPAGIAMGSVGSLLERQDFSPEELRAALAGSRGSRQPDGLLRKGLGQREFLSYLHLPKKDSKSTKNTKRAPRNEPADYATLYYREHSRAGDFSKTSLPERGRFDKCRIRPSVFKPTAGNGKGFLSMQSLASHKGQKLWRSNGSLHTLACHPPLSPGPRASQARAQLLHALSLDEGGPEPEPSLSDSSSGGSFGRSPGTGPSPFSSSLGHLNHLGGSLDRASQGPKEAGPPAVLSCLPEPPPPYEFSCSSAEEMGAVLPETCEELKRGLGDEDGSNPFTQVLEERQRLWLAELKRLYVERLHEVTQKAERSERNLQLQLFMAQQEQRRLRKELRAQQGLAPEPRAPGTLPEADPSARPEEEARWEVCQKTAEISLLKQQLREAQAELAQKLAEIFSLKTQLRGSRAQAQAQDAELVRLREAVRSLQEQAPREEAPGSCETDDCKSRGLLGEAGGSEARDSAEQLRAELLQERLRGQEQALRFEQERRTWQEEKERVLRYQREIQGGYMDMYRRNQALEQELRALREPPTPWSPRLESSKI

SEQ ID NO: 555 - protein, 411 aa, Homo sapiens
MSPARLRPRLHFCLVLLLLLVVPAAWGCGPGRVVGSRRRPPRKLVPLAYKQFSPNVPEKTLGASGRYEGKIARSSERFKELTPNYNPDIIFKDEENTGADRLMTQRCKDRLNSLAISVMNQWPGVKLRVTEGWDEDGHHSEESLHYEGRAVDITTSDRDRNKYGLLARLAVEAGFDWVYYESKAHVHCSVKSEHSAAAKTGGCFPAGAQVRLESGARVALSAVRPGDRVLAMGEDGSPTFSDVLILLDREPHRLRAFQVIETQDPPRRLALTPAHLLFTADNHTEPAARFRATFASHVQPGQYVLVAGAPGLQPARVAAVSTHVALGAYAPLTKHGTLVVEDVVASCFAAVADHHLAQLAFWPLRLFHSLAWGSWTPGEGVHWYPQLLYRLGRLLLEEGSFHPLGMSGAGS

SEQ ID NO: 556 - protein, 387 aa, Homo sapiens
MSVAFAAPRQRGKGEITPAAIQKMLDDNNHLIQCIMDSQNKGKTSECSQYQQMLHTNLVYLATIADSNQNMQSLLPAPPTQNMPMGPGGMNQSGPPPPPRSHNMPSDGMVGGGPPAPHMQNQMNGQMPGPNHMPMQGPGPNQLNMTNSSMNMPSSSHGSMGGYNHSVPSSQSMPVQNQMTMSQGQPMGNYGPRPNMSMQPNQGPMMHQQPPSQQYNMPQGGGQHYQGQQPPMGMMGQVNQGNHMMGQRQIPPYRPPQQGPPQQYSGQEDYYGDQYSHGGQGPPEGMNQQYYPDGNSQYGQQQDAYQGPPPQQGYPPQQQQYPGQQGYPGQQQGYGPSQGGPGPQYPNYPQGQGQQYGGYRPTQPGPPQPPQQRPYGYDQGQYGNYQQ

SEQ ID NO: 557 - protein, 612 aa, Homo sapiens
MAAAGRLPSSWALFSPLLAGLALLGVGPVPARALHNVTAELFGAEAWGTLAAFGDLNSDKQTDLFVLRERNDLIVFLADQNAPYFKPKVKVSFKNHSALITSVVPGDYDGDSQMDVLLTYLPKNYAKSELGAVIFWGQNQTLDPNNMTILNRTFQDEPLIMDFNGDLIPDIFGITNESNQPQILLGGNLSWHPALTTTSKMRIPHSHAFIDLTEDFTADLFLTTLNATTSTFQFEIWENLDGNFSVSTILEKPQNMMVVGQSAFADFDGDGHMDHLLPGCEDKNCQKSTIYLVRSGMKQWVPVLQDFSNKGTLWGFVPFVDEQQPTEIPIPITLHIGDYNMDGYPDALVILKNTSGSNQQAFLLENVPCNNASCEEARRMFKVYWELTDLNQIKDAMVATFFDIYEDGILDIVVLSKGYTKNDFAIHTLKNNFEADAYFVKVIVLSGLCSNDCPRKITPFGVNQPGPYIMYTTVDANGYLKNGSAGQLSQSAHLALQLPYNVLGLGRSANFLDHLYVGIPRPSGEKSIRKQEWTAIIPNSQLIVIPYPHNVPRSWSAKLYLTPSNIVLLTAIALIGVCVFILAIIGILHWQEKKADDREKRQEAHRFHFDAM

SEQ ID NO: 558 - protein, 476 aa, Homo sapiens
MGIKFLEVIKPFCAVLPEIQKPERKIQFREKVLWTAITLFIFLVCCQIPLFGIMSSDSADPFYWMRVILASNRGTLMELGISPIVTSGLIMQLLAGAKIIEVGDTPKDRALFNGAQKLFGMIITIGQAIVYVMTGMYGDPAEMGAGICLLIIIQLFVAGLIVLLLDELLQKGYGLGSGISLFIATNICETIVWKAFSPTTINTGRGTEFEGAVIALFHLLATRTDKVRALREAFYRQNLPNLMNLIATVFVFAVVIYFQGFRVDLPIKSARYRGQYSSYPIKLFYTSNIPIILQSALVSNLYVISQMLSVRFSGNFLVNLLGQWADVSGGGPARSYPVGGLCYYLSPPESMGAIFEDPVHVVVYIIFMLGSCAFFSKTWIEVSGSSAKDVAKQLKEQQMVMRGHRDTSMVHELNRYIPTAAAFGGLCIGALSVLADFLGAIGSGTGILLAVTIIYQYFEIFVKEQAEVGGMGALFF

SEQ ID NO: 559 - protein, 535 aa, Homo sapiens
MKKISLKTLRKSFNLNKSKEETDFMVVQQPSLASDFGKDDSLFGSCYGKDMASCDINGEDEKGGKNRSKSESLMGTLKRRLSAKQKSKGKAGTPSGSSADEDTFSSSSAPIVFKDVRAQRPIRSTSLRSHHYSPAPWPLRPTNSEETCIKMEVRVKALVHSSSPSPALNGVRKDFHDLQSETTCQEQANSLKSSASHNGDLHLHLDEHVPVVIGLMPQDYIQYTVPLDEGMYPLEGSRSYCLDSSSPMEVSAVPPQVGGRAFPEDESQVDQDLVVAPEIFVDQSVNGLLIGTTGVMLQSPRAGHDDVPPLSPLLPPMQNNQIQRNFSGLTGTEAHVAESMRCHLNFDPNSAPGVARVYDSVQSSGPMVVTSLTEELKKLAKQGWYWGPITRWEAEGKLANVPDGSFLVRDSSDDRYLLSLSFRSHGKTLHTRIEHSNGRFSFYEQPDVEGHTSIVDLIEHSIRDSENGAFCYSRSRLPGSATYPVRLTNPVSRFMQVRSLQYLCRFVIRQYTRIDLIQKLPLPNKMKDYLQEKHY

SEQ ID NO: 560 - protein, 551 aa, Homo sapiens
MAENWKNCFEEELICPICLHVFVEPVQLPCKHNFCRGCIGEAWAKDSGLVRCPECNQAYNQKPGLEKNLKLTNIVEKFNALHVEKPPAALHCVFCRRGPPLPAQKVCLRCEAPCCQSHVQTHLQQPSTARGHLLVEADDVRAWSCPQHNAYRLYHCEAEQVAVCQYCCYYSGARQGHSVCDVEIRRNEIRKMLMKQQDRLEEREQDIEDQLYKLESDKRLVEEKVNQLKEEVRLQYEKLHQLLDEDLRQTVEVLDKAQAKFCSENAAQALHLGERMQEAKKLLGSLQLLFDKTEDVSFMKNTKSVKILMDRTQTCTSSSLSPTKIGHLNSKLFLNEVAKKEKQLRKMLEGPFSTPVPFLQSVPLYPCGVSSSGAEKRKHSTAFPEASFLETSSGPVGGQYGAAGTASGEGQSGQPLGPCSSTQHLVALPGGAQPVHSSPVFPPSQYPNGSAAQQPMLPQYGGRKILVCSVDNCYCSSVANHGGHQPYPRSGHFPWTVPSQEYSHPLPPTPSVPQSLPSLAVRDWLDASQQPGHQDFYRVYGQPSTKHYVTS

SEQ ID NO: 561 - protein, 1084 aa, Homo sapiens
MEQPKGVDWTVIILTCQYKDSVQVFQRELEVRQKREQIPAGTLLLAVEDPEKRVGSGGATLNALLVAAEHLSARAGFTVVTSDVLHSAWILILHMGRDFPFDDCGRAFTCLPVENPEAPVEALVCNLDCLLDIMTYRLGPGSPPGVWVCSTDMLLSVPANPGISWDSFRGARVIALPGSPAYAQNHGVYLTDPQGLVLDIYYQGTEAEIQRCVRPDGRVPLVSGVVFFSVETAERLLATHVSPPLDACTYLGLDSGARPVQLSLFFDILHCMAENVTREDFLVGRPPELGQGDADVAGYLQSARAQLWRELRDQPLTMAYVSSGSYSYMTSSASEFLLSLTLPGAPGAQIVHSQVEEQQLLAAGSSVVSCLLEGPVQLGPGSVLQHCHLQGPIHIGAGCLVTGLDTAHSKALHGRELRDLVLQGHHTRLHGSPGHAFTLVGRLDSWERQGAGTYLNVPWSEFFKRTGVRAWDLWDPETLPAEYCLPSARLFPVLHPSRELGPQDLLWMLDHQEDGGEALRAWRASWRLSWEQLQPCLDRAATLASRRDLFFRQALHKARHVLEARQDLSLRPLIWAAVREGCPGPLLATLDQVAAGAGDPGVAARALACVADVLGCMAEGRGGLRSGPAANPEWMRPFSYLECGDLAAGVEALAQERDKWLSRPALLVRAARHYEGAGQILIRQAVMSAQHFVSTEQVELPGPGQWVVAECPARVDFSGGWSDTPPLAYELGGAVLGLAVRVDGRRPIGARARRIPEPELWLAVGPRQDEMTVKIVCRCLADLRDYCQPHAPGALLKAAFICAGIVHVHSELQLSEQLLRTFGGGFELHTWSELPHGSGLGTSSILAGTALAALQRAAGRVVGTEALIHAVLHLEQVLTTGGGWQDQVGGLMPGIKVGRSRAQLPLKVEVEEVTVPEGFVQKLNDHLLLVYTGKTRLARNLLQDVLRSWYARLPAVVQNAHSLVRQTEECAEGFRQGSLPLLGQCLTSYWEQKKLMAPGCEPLTVRRMMDVLAPHVHGQSLAGAGGGGFLYLLTKEPQQKEALEAVLAKTEGLGNYSIHLVEVDTQGLSLKLLGTEASTCCPFP

SEQ ID NO: 562 - protein, 336 aa, Homo sapiens
MDCVGWPPGRKWHLEKNTSCGGSSGICASYVTQMADDQGCIEEQGVEDSANEDSVDAKPDRSSFVPSLFSKKKKNVTMRSIKTTRDRVPTYQYNMNFEKLGKCIIINNKNFDKVTGMGVRNGTDKDAEALFKCFRSLGFDVIVYNDCSCAKMQDLLKKASEEDHTNAACFACILLSHGEENVIYGKDGVTPIKDLTAHFRGDRCKTLLEKPKLFFIQACRGTELDDGIQADSGPINDTDANPRYKIPVEADFLFAYSTVPGYYSWRSPGRGSWFVQALCSILEEHGKDLEIMQILTRVNDRVARHFESQSDDPHFHEKKQIPCVVSMLTKELYFSQ

SEQ ID NO: 563 - protein, 225 aa, Homo sapiens
MAGGGAGDPGLGAAAAPAPETREHLFKVLVIGELGVGKTSIIKRYVHQLFSQHYRATIGVDFALKVLNWDSRTLVRLQLWDIAGQERFGNMTRVYYKEAVGAFVVFDISRSSTFEAVLKWKSDLDSKVHLPNGSPIPAVLLANKCDQNKDSSQSPSQVDQFCKEHGFAGWFETSAKDNINIEEAARFLVEKILVNHQSFPNEENDVDKIKLDQETLRAENKSQCC

SEQ ID NO: 564 - protein, 346 aa, Homo sapiens
MFLSILVALCLWLHLALGVRGAPCEAVRIPMCRHMPWNITRMPNHLHHSTQENAILAIEQYEELVDVNCSAVLRFFFCAMYAPICTLEFLHDPIKPCKSVCQRARDDCEPLMKMYNHSWPESLACDELPVYDRGVCISPEAIVTDLPEDVKWIDITPDMMVQERPLDVDCKRLSPDRCKCKKVKPTLATYLSKNYSYVIHAKIKAVQRSGCNEVTTVVDVKEIFKSSSPIPRTQVPLITNSSCQCPHILPHQDVLIMCYEWRSRMMLLENCLVEKWRDQLSKRSIQWEERLQEQRRTVQDKKKTAGRTSRSNPPKPKGKPPAPKPASPKKNIKTRSAQKRTNPKRV

SEQ ID NO: 565 - protein, 770 aa, Homo sapiens
MSNEVETSATNGQPDQQAAPKAPSKKEKKKGPEKTDEYLLARFKGDGVKYKAKLIGIDDVPDARGDKMSQDSMMKLKGMAARGRSQGQHKQRIWVNISLSGIKIIDEKTGVIEHEHPVNKISFIARDVTDNRAFGYVCGGEGQHQFFTIKTGQQAEPLVVDLKDLFQVIYNVKKKEEEKKKIEEASKAVENGSEALRILDDQTNKLKSGVDQMDLFGDMSTPPDLNSPTESKDILLVDLNSEIDTNQNSLRENPFLTNGITSCSLPRPTPQASFLPENAFSANLNFFPTPNPDPFRDDPFTQPDQSTPSSFDSLKSPDQKKENSSSSSTPLSNGPLNGDVDYFGQQFDQISNRTGKQEAQAGPWPFSSSQTQPAVRTQNGVSEREQNGFSVKSSPNPFVGSPPKGLSIQNGVKQDLESSVQSSPHDSIAIIPPPQSTKPGRGRRTAKSSANDLLASDIFAPPVSEPSGQASPTGQPTALQPNPLDLFKTSAPAPVGPLVGLGGVTVTLPQAGPWNTASLVFNQSPSMAPGAMMGGQPSGFSQPVIFGTSPAVSGWNQPSPFAASTPPPVPVVWGPSASVAPNAWSTTSPLGNPFQSNIFPAPAVSTQPPSMHSSLLVTPPQPPPRAGPPKDISSDAFTALDPLGDKEIKDVKEMFKDFQLRQPPAVPARKGEQTSSGTLSAFASYFNSKVGIPQENADHDDFDANQLLNKINEPPKPAPRQVSLPVTKSTDNAFENPFFKDSFGSSQASVASSQPVSSEMYRDPFGNPFA

SEQ ID NO: 566 - protein, 604 aa, Homo sapiens
MLARALLLCAVLALSHTANPCCSHPCQNRGVCMSVGFDQYKCDCTRTGFYGENCSTPEFLTRIKLFLKPTPNTVHYILTHFKGFWNVVNNIPFLRNAIMSYVLTSRSHLIDSPPTYNADYGYKSWEAFSNLSYYTRALPPVPDDCPTPLGVKGKKQLPDSNEIVEKLLLRRKFIPDPQGSNMMFAFFAQHFTHQFFKTDHKRGPAFTNGLGHGVDLNHIYGETLARQRKLRLFKDGKMKYQIIDGEMYPPTVKDTQAEMIYPPQVPEHLRFAVGQEVFGLVPGLMMYATIWLREHNRVCDVLKQEHPEWGDEQLFQTSRLILIGETIKIVIEDYVQHLSGYHFKLKFDPELLFNKQFQYQNRIAAEFNTLYHWHPLLPDTFQIHDQKYNYQQFIYNNSILLEHGITQFVESFTRQIAGRVAGGRNVPPAVQKVSQASIDQSRQMKYQSFNEYRKRFMLKPYESFEELTGEKEMSAELEALYGDIDAVELYPALLVEKPRPDAIFGETMVEVGAPFSLKGLMGNVICSPAYWKPSTFGGEVGFQIINTASIQSLICNNVKGCPFTSFSVPDPELIKTVTINASSSRSGLDDINPTVLLKERSTEL

SEQ ID NO: 567 - protein, 3396 aa, Homo sapiens
MFINIKSILWMCSTLIVTHALHKVKVGKSPPVRGSLSGKVSLPCHFSTMPTLPPSYNTSEFLRIKWSKIEVDKNGKDLKETTVLVAQNGNIKIGQDYKGRVSVPTHPEAVGDASLTVVKLLASDAGLYRCDVMYGIEDTQDTVSLTVDGVVFHYRAATSRYTLNFEAAQKACLDVGAVIATPEQLFAAYEDGFEQCDAGWLADQTVRYPIRAPRVGCYGDKMGKAGVRTYGFRSPQETYDVYCYVDHLDGDVFHLTVPSKFTFEEAAKECENQDARLATVGELQAAWRNGFDQCDYGWLSDASVRHPVTVARAQCGGGLLGVRTLYRFENQTGFPPPDSRFDAYCFKPKEATTIDLSILAETASPSLSKEPQMVSDRTTPIIPLVDELPVIPTEFPPVGNIVSFEQKATVQPQAITDSLATKLPTPTGSTKKPWDMDDYSPSASGPLGKLDISEIKEEVLQSTTGVSHYATDSWDGVVEDKQTQESVTQIEQIEVGPLVTSMEILKHIPSKEFPVTETPLVTARMILESKTEKKMVSTVSELVTTGHYGFTLGEEDDEDRTLTVGSDESTLIFDQIPEVITVSKTSEDTIHTHLEDLESVSASTTVSPLIMPDNNGSSMDDWEERQTSGRITEEFLGKYLSTTPFPSQHRTEIELFPYSGDKILVEGISTVIYPSLQTEMTHRRERTETLIPEMRTDTYTDEIQEEITKSPFMGKTEEEVFSGMKLSTSLSEPIHVTESSVEMTKSFDFPTLITKLSAEPTEVRDMEEDFTATPGTTKYDENITTVLLAHGTLSVEAATVSKWSWDEDNTTSKPLESTEPSASSKLPPALLTTVGMNGKDKDIPSFTEDGADEFTLIPDSTQKQLEEVTDEDIAAHGKFTIRFQPTTSTGIAEKSTLRDSTTEEKVPPITSTEGQVYATMEGSALGEVEDVDLSKPVSTVPQFAHTSEVEGLAFVSYSSTQEPTTYVDSSHTIPLSVIPKTDWGVLVPSVPSEDEVLGEPSQDILVIDQTRLEATISPETMRTTKITEGTTQEEFPWKEQTAEKPVPALSSTAWTPKEAVTPLDEQEGDGSAYTVSEDELLTGSERVPVLETTPVGKIDHSVSYPPGAVTEHKVKTDEVVTLTPRIGPKVSLSPGPEQKYETEGSSTTGFTSSLSPFSTHITQLMEETTTEKTSLEDIDLGSGLFEKPKATELIEFSTIKVTVPSDITTAFSSVDRLHTTSAFKPSSAITKKPPLIDREPGEETTSDMVIIGESTSHVPPTTLEDIVAKETETDIDREYFTTSSPPATQPTRPPTVEDKEAFGPQALSTPQPPASTKFHPDINVYIIEVRENKTGRMSDLSVIGHPIDSESKEDEPCSEETDPVHDLMAEILPEFPDIIEIDLYHSEENEEEEEECANATDVTTTPSVQYINGKHLVTTVPKDPEAAEARRGQFESVAPSQNFSDSSESDTHPFVIAKTELSTAVQPNESTETTESLEVTWKPETYPETSEHFSGGEPDVFPTVPFHEEFESGTAKKGAESVTERDTEVGHQAHEHTEPVSLFPEESSGEIAIDQESQKIAFARATEVTFGEEVEKSTSVTYTPTIVPSSASAYVSEEEAVTLIGNPWPDDLLSTKESWVEATPRQVVELSGSSSIPITEGSGEAEEDEDTMFTMVTDLSQRNTTDTLITLDTSRIITESFFEVPATTIYPVSEQPSAKVVPTKFVSETDTSEWISSTTVEEKKRKEEEGTTGTASTFEVYSSTQRSDQLILPFELESPNVATSSDSGTRKSFMSLTTPTQSEREMTDSTPVFTETNTLENLGAQTTEHSSIHQPGVQEGLTTLPRSPASVFMEQGSGEAAADPETTTVSSFSLNVEYAIQAEKEVAGTLSPHVETTFSTEPTGLVLSTVMDRVVAENITQTSREIVISERLGEPNYGAEIRGFSTGFPLEEDFSGDFREYSTVSHPIAKEETVMMEGSGDAAFRDTQTSPSTVPTSVHISHISDSEGPSSTMVSTSAFPWEEFTSSAEGSGEQLVTVSSSVVPVLPSAVQKFSGTASSIIDEGLGEVGTVNEIDRRSTILPTAEVEGTKAPVEKEEVKVSGTVSTNFPQTIEPAKLWSRQEVNPVRQEIESETTSEEQIQEEKSFESPQNSPATEQTIFDSQTFTETELKTTDYSVLTTKKTYSDDKEMKEEDTSLVNMSTPDPDANGLESYTTLPEATEKSHFFLATALVTESIPAEHVVTDSPIKKEESTKHFPKGMRPTIQESDTELLFSGLGSGEEVLPTLPTESVNFTEVEQINNTLYPHTSQVESTSSDKIEDFNRMENVAKEVGPLVSQTDIFEGSGSVTSTTLIEILSDTGAEGPTVAPLPFSTDIGHPQNQTVRWAEEIQTSRPQTITEQDSNKNSSTAEINETTTSSTDFLARAYGFEMAKEFVTSAPKPSDLYYEPSGEGSGEVDIVDSFHTSATTQATRQESSTTFVSDGSLEKHPEVPSAKAVTADGFPTVSVMLPLHSEQNKSSPDPTSTLSNTVSYERSTDGSFQDRFREFEDSTLKPNRKKPTENIIIDLDKEDKDLILTITESTILEILPELTSDKNTIIDIDHTKPVYEDILGMQTDIDTEVPSEPHDSNDESNDDSTQVQEIYEAAVNLSLTEETFEGSADVLASYTQATHDESMTYEDRSQLDHMGFHFTTGIPAPSTETELDVLLPTATSLPIPRKSATVIPEIEGIKAEAKALDDMFESSTLSDGQAIADQSEIIPTLGQFERTQEEYEDKKHAGPSFQPEFSSGAEEALVDHTPYLSIATTHLMDQSVTEVPDVMEGSNPPYYTDTTLAVSTFAKLSSQTPSSPLTIYSGSEASGHTEIPQPSALPGIDVGSSVMSPQDSFKEIHVNIEATFKPSSEEYLHITEPPSLSPDTKLEPSEDDGKPELLEEMEASPTELIAVEGTEILQDFQNKTDGQVSGEAIKMFPTIKTPEAGTVITTADEIELEGATQWPHSTSASATYGVEAGVVPWLSPQTSERPTLSSSPEINPETQAALIRGQDSTIAASEQQVAARILDSNDQATVNPVEFNTEVATPPFSLLETSNETDFLIGINEESVEGTAIYLPGPDRCKMNPCLNGGTCYPTETSYVCTCVPGYSGDQCELDFDECHSNPCRNGATCVDGFNTFRCLCLPSYVGALCEQDTETCDYGWHKFQGQCYKYFAHRRTWDAAERECRLQGAHLTSILSHEEQMFVNRVGHDYQWIGLNDKMFEHDFRWTDGSTLQYENWRPNQPDSFFSAGEDCVVIIWHENGQWNDVPCNYHLTYTCKKGTVACGQPPVVENAKTFGKMKPRYEINSLIRYHCKDGFIQRHLPTIRCLGNGRWAIPKITCMNPSAYQRTYSMKYFKNSSSAKDNSINTSKHDHRWSRRWQESRR

SEQ ID NO: 568 - protein, 135 aa, Homo sapiens
MPVDFTGYWKMLVNENFEEYLRALDVNVALRKIANLLKPDKEIVQDGDHMIIRTLSTFRNYIMDFQVGKEFEEDLTGIDDRKCMTTVSWDGDKLQCVQKGEKEGRGWTQWIEGDELHLEMRVEGVVCKQVFKKVQ

SEQ ID NO: 569 - protein, 236 aa, Homo sapiens
MAETKLQLFVKASEDGESVGHCPSCQRLFMVLLLKGVPFTLTTVDTRRSPDVLKDFAPGSQLPILLYDSDAKTDTLQIEDFLEETLGPPDFPSLAPRYRESNTAGNDVFHKFSAFIKNPVPAQDEALYQQLLRALARLDSYLRAPLEHELAGEPQLRESRRRFLDGDRLTLADCSLLPKLHIVDTVCAHFRQAPIPAELRGVRRYLDSAMQEKEFKYTCPHSAEILAAYRPAVHPR

SEQ ID NO: 570 - protein, 488 aa, Homo sapiens
MSTPGVNSSASLSPDRLNSPVTIPAVMFIFGVVGNLVAIVVLCKSRKEQKETTFYTLVCGLAVTDLLGTLLVSPVTIATYMKGQWPGGQPLCEYSTFILLFFSLSGLSIICAMSVERYLAINHAYFYSHYVDKRLAGLTLFAVYASNVLFCALPNMGLGSSRLQYPDTWCFIDWTTNVTAHAAYSYMYAGFSSFLILATVLCNVLVCGALLRMHRQFMRRTSLGTEQHHAAAAASVASRGHPAASPALPRLSDFRRRRSFRRIAGAEIQMVILLIATSLVVLICSIPLVVRVFVNQLYQPSLEREVSKNPDLQAIRIASVNPILDPWIYILLRKTVLSKAIEKIKCLFCRIGGSRRERSGQHCSDSQRTSSAMSGHSRSFISRELKEISSTSQTLLPDLSLPDLSENGLGGRNLLPGVPGMGLAQEDTTSLRTLRISETSDSSQGQDSESVLLVDEAGGSGRAGPAPKGSSLQVTFPSETLNLSEKCI

SEQ ID NO: 571 - protein, 321 aa, Homo sapiens
MKHIPVLEDGPWKTVCVKELNGLKKLKRKGKEPARRANGYKTFRLDLEAPEPRAVATNGLRDRTHRLQPVPVPVPVPVPVAPAVPPRGGTDTAGERGGSRAPEVSDARKRCFALGAVGPGLPTPPPPPPPAPQSQAPGGPEAQPFREPGPRPRILLCAPPARPAPSAPPAPPAPPESTVRPAPPTRPGESSYSSISHVIYNNHQDSSASPRKRPGEATAASSEIKALQQTRRLLANARERTRVHTISAAFEALRKQVPCYSYGQKLSKLAILRIACNYILSLARLADLDYSADHSNLSFSECVQRCTRTLQAEGRAKKRKE

SEQ ID NO: 572 - protein, 1143 aa, Homo sapiens
MAVPARTCGASRPGPARTARPWPGCGPHPGPGTRRPTSGPPRPLWLLLPLLPLLAAPGASAYSFPQQHTMQHWARRLEQEVDGVMRIFGGVQQLREIYKDNRNLFEVQENEPQKLVEKVAGDIESLLDRKVQALKRLADAAENFQKAHRWQDNIKEEDIVYYDAKADAELDDPESEDVERGSKASTLRLDFIEDPNFKNKVNYSYAAVQIPTDIYKGSTVILNELNWTEALENVFMENRRQDPTLLWQVFGSATGVTRYYPATPWRAPKKIDLYDVRRRPWYIQGASSPKDMVIIVDVSGSVSGLTLKLMKTSVCEMLDTLSDDDYVNVASFNEKAQPVSCFTHLVQANVRNKKVFKEAVQGMVAKGTTGYKAGFEYAFDQLQNSNITRANCNKMIMMFTDGGEDRVQDVFEKYNWPNRTVRVFTFSVGQHNYDVTPLQWMACANKGYYFEIPSIGAIRINTQEYLDVLGRPMVLAGKEAKQVQWTNVYEDALGLGLVVTGTLPVFNLTQDGPGEKKNQLILGVMGIDVALNDIKRLTPNYTLGANGYVFAIDLNGYVLLHPNLKPQTTNFREPVTLDFLDAELEDENKEEIRRSMIDGNKGHKQIRTLVKSLDERYIDEVTRNYTWVPIRSTNYSLGLVLPPYSTFYLQANLSDQILQVKYFEFLLPSSFESEGHVFIAPREYCKDLNASDNNTEFLKNFIELMEKVTPDSKQCNNFLLHNLILDTGITQQLVERVWRDQDLNTYSLLAVFAATDGGITRVFPNKAAEDWTENPEPFNASFYRRSLDNHGYVFKPPHQDALLRPLELENDTVGILVSTAVELSLGRRTLRPAVVGVKLDLEAWAEKFKVLASNRTHQDQPQKCGPNSHCEMDCEVNNEDLLCVLIDDGGFLVLSNQNHQWDQVGRFFSEVDANLMLALYNNSFYTRKESYDYQAACAPQPPGNLGAAPRGVFVPTVADFLNLAWWTSAAAWSLFQQLLYGLIYHSWFQADPAEAEGSPETRESSCVMKQTQYYFGSVNASYNAIIDCGNCSRLFHAQRLTNTNLLFVVAEKPLCSQCEAGRLLQKETHSDGPEQCELVQRPRYRRGPHICFDYNATEDTSDCGRGASFPPSLGVLVSLQLLLLLGLPPRPQPQVLVHASRRL

SEQ ID NO: 573 - protein, 743 aa, Homo sapiens
MSLSMRDPVIPGTSMAYHPFLPHRAPDFAMSAVLGHQPPFFPALTLPPNGAAALSLPGALAKPIMDQLVGAAETGIPFSSLGPQAHLRPLKTMEPEEEVEDDPKVHLEAKELWDQFHKRGTEMVITKSGRRMFPPFKVRCSGLDKKAKYILLMDIIAADDCRYKFHNSRWMVAGKADPEMPKRMYIHPDSPATGEQWMSKVVTFHKLKLTNNISDKHGFTLAFPSDHATWQGNYSFGTQTILNSMHKYQPRFHIVRANDILKLPYSTFRTYLFPETEFIAVTAYQNDKITQLKIDNNPFAKGFRDTGNGRREKRKQLTLQSMRVFDERHKKENGTSDESSSEQAAFNCFAQASSPAASTVGTSNLKDLCPSEGESDAEAESKEEHGPEACDAAKISTTTSEEPCRDKGSPAVKAHLFAAERPRDSGRLDKASPDSRHSPATISSSTRGLGAEERRSPVREGTAPAKVEEARALPGKEAFAPLTVQTDAAAAHLAQGPLPGLGFAPGLAGQQFFNGHPLFLHPSQFAMGGAFSSMAAAGMGPLLATVSGASTGVSGLDSTAMASAAAAQGLSGASAATLPFHLQQHVLASQGLAMSPFGSLFPYPYTYMAAAAAASSAAASSSVHRHPFLNLNTMRPRLRYSPYSIPVPVPDGSSLLTTALPSMAAAAGPLDGKVAALAASPASVAVDSGSELNSRSSTLSSSSMSLSPKLCAEKEAATSELQSIQRLVSGLEAKPDRSRSASP

SEQ ID NO: 574 - protein, 161 aa, Homo sapiens
MKAVSPVRPSGRKAPSGCGGGELALRCLAEHGHSLGGSAAAAAAAAAARCKAAEAAADEPALCLQCDMNDCYSRLRRLVPTIPPNKKVSKVEILQHVIDYILDLQLALETHPALLRQPPPPAPPHHPAGTCPAAPPRTPLTALNTDPAGAVNKQGDSILCR

SEQ ID NO: 575 - protein, 428 aa, Homo sapiens
MATSWGTVFFMLVVSCVCSAVSHRNQQTWFEGIFLSSMCPINVSASTLYGIMFDAGSTGTRIHVYTFVQKMPGQLPILEGEVFDSVKPGLSAFVDQPKQGAETVQGLLEVAKDSIPRSHWKKTPVVLKATAGLRLLPEHKAKALLFEVKEIFRKSPFLVPKGSVSIMDGSDEGILAWVTVNFLTGQLHGHRQETVGTLDLGGASTQITFLPQFEKTLEQTPRGYLTSFEMFNSTYKLYTHSYLGFGLKAARLATLGALETEGTDGHTFRSACLPRWLEAEWIFGGVKYQYGGNQEGEVGFEPCYAEVLRVVRGKLHQPEEVQRGSFYAFSYYYDRAVDTDMIDYEKGGILKVEDFERKAREVCDNLENFTSGSPFLCMDLSYITALLKDGFGFADSTVLQLTKKVNNIETGWALGATFHLLQSLGISH

SEQ ID NO: 576 - protein, 266 aa, Homo sapiens
MMKTLSSGNCTLSVPAKNSYRMVVLGASRVGKSSIVSRFLNGRFEDQYTPTIEDFHRKVYNIRGDMYQLDILDTSGNHPFPAMRRLSILTGDVFILVFSLDNRESFDEVKRLQKQILEVKSCLKNKTKEAAELPMVICGNKNDHGELCRQVPTTEAELLVSGDENCAYFEVSAKKNTNVDEMFYVLFSMAKLPHEMSPALHRKISVQYGDAFHPRPFCMRRVKEMDAYGMVSPFARRPSVNSDLKYIKAKVLREGQARERDKCTIQ

SEQ ID NO: 577 - protein, 351 aa, Homo sapiens
MGNAATAKKGSEVESVKEFLAKAKEDFLKKWENPTQNNAGLEDFERKKTLGTGSFGRVMLVKHKATEQYYAMKILDKQKVVKLKQIEHTLNEKRILQAVNFPFLVRLEYAFKDNSNLYMVMEYVPGGEMFSHLRRIGRFSEPHARFYAAQIVLTFEYLHSLDLIYRDLKPENLLIDHQGYIQVTDFGFAKRVKGRTWTLCGTPEYLAPEIILSKGYNKAVDWWALGVLIYEMAAGYPPFFADQPIQIYEKIVSGKVRFPSHFSSDLKDLLRNLLQVDLTKRFGNLKNGVSDIKTHKWFATTDWIAIYQRKVEAPFIPKFRGSGDTSNFDDYEEEDIRVSITEKCAKEFGEF

SEQ ID NO: 578 - protein, 430 aa, Homo sapiens
MHSTTPISSLFSFTSPAVKRLLGWKQGDEEEKWAEKAVDSLVKKLKKKKGAMDELERALSCPGQPSKCVTIPRSLDGRLQVSHRKGLPHVIYCRVWRWPDLQSHHELKPLECCEFPFGSKQKEVCINPYHYRRVETPVLPPVLVPRHSEYNPQLSLLAKFRSASLHSEPLMPHNATYPDSFQQPPCSALPPSPSHAFSQSPCTASYPHSPGSPSEPESPYQHSDFRPVCYEEPQHWCSVAYYELNNRVGETFQASSRSVLIDGFTDPSNNRNRFCLGLLSNVNRNSTIENTRRHIGKGVHLYYVGGEVYAECVSDSSIFVQSRNCNYQHGFHPATVCKIPSGCSLKVFNNQLFAQLLAQSVHHGFEVVYELTKMCTIRMSFVKGWGAEYHRQDVTSTPCWIEIHLHGPLQWLDKVLTQMGSPHNPISSVS

SEQ ID NO: 579 - protein, 361 aa, Homo sapiens
MAGGRHRRVVGTLHLLLLVAALPWASRGVSPSASAWPEEKNYHQPAILNSSALRQIAEGTSISEMWQNDLQPLLIERYPGSPGSYAARQHIMQRIQRLQADWVLEIDTFLSQTPYGYRSFSNIISTLNPTAKRHLVLACHYDSKYFSHWNNRVFVGATDSAVPCAMMLELARALDKKLLSLKTVSDSKPDLSLQLIFFDGEEAFLHWSPQDSLYGSRHLAAKMASTPHPPGARGTSQLHGMDLLVLLDLIGAPNPTFPNFFPNSARWFERLQAIEHELHELGLLKDHSLEGRYFQNYSYGGVIQDDHIPFLRRGVPVLHLIPSPFPEVWHTMDDNEENLDESTIDNLNKILQVFVLEYLHL

SEQ ID NO: 580 - protein, 253 aa, Homo sapiens
MALSMPLNGLKEEDKEPLIELFVKAGSDGESIGNCPFSQRLFMILWLKGVVFSVTTVDLKRKPADLQNLAPGTHPPFITFNSEVKTDVNKIEEFLEEVLCPPKYLKLSPKHPESNTAGMDIFAKFSAYIKNSRPEANEALERGLLKTLQKLDEYLNSPLPDEIDENSMEDIKFSTRKFLDGNEMTLADCNLLPKLHIVKVVAKKYRNFDIPKEMTGIWRYLTNAYSRDEFTNTCPSDKEVEIAYSDVAKRLTK

SEQ ID NO: 581 - protein, 119 aa, Homo sapiens
MKALSPVRGCYEAVCCLSERSLAIARGRGKGPAAEEPLSLLDDMNHCYSRLRELVPGVPRGTQLSQVEILQRVIDYILDLQVVLAEPAPGPPDGPHLPIQTAELAPELVISNDKRSFCH

SEQ ID NO: 582 - protein, 512 aa, Homo sapiens
MWRVRKRGYFGIWSFPLIIAAVCAQSVNDPSNMSLVKETVDRLLKGYDIRLRPDFGGPPVAVGMNIDIASIDMVSEVNMDYTLTMYFQQAWRDKRLSYNVIPLNLTLDNRVADQLWVPDTYFLNDKKSFVHGVTVKNRMIRLHPDGTVLYGLRITTTAACMMDLRRYPLDEQNCTLEIESYGYTTDDIEFYWRGDDNAVTGVTKIELPQFSIVDYKLITKKVVFSTGSYPRLSLSFKLKRNIGYFILQTYMPSILITILSWVSFWINYDASAARVALGITTVLTMTTINTHLRETLPKIPYVKAIDMYLMGCFVFVFMALLEYALVNYIFFGRGPQRQKKAAEKAASANNEKMRLDVNKIFYKDIKQNGTQYRSLWDPTGNLSPTRRTTNYDFSLYTMDPHENILLSTLEIKNEMATSEAVMGLGDPRSTMLAYDASSIQYRKAGLPRHSFGRNALERHVAQKKSRLRRRASQLKITIPDLTDVNAIDRWSRIFFPVVFSFFNIVYWLYYVN

SEQ ID NO: 583 - protein, 367 aa, Homo sapiens
MRWFLPWTLAAVTAAAASTVLATALSPAPTTMDFTPAPLEDTSSRPQFCKWPCECPPSPPRCPLGVSLITDGCECCKMCAQQLGDNCTEAAICDPHRGLYCDYSGDRPRYAIGVCAQVVGVGCVLDGVRYNNGQSFQPNCKYNCTCIDGAVGCTPLCLRVRPPRLWCPHPRRVSIPGHCCEQWVCEDDAKRPRKTAPRDTGAFDAVGEVEAWHRNCIAYTSPWSPCSTSCGLGVSTRISNVNAQCWPEQESRLCNLRPCDVDIHTLIKAGKKCLAVYQPEASMNFTLAGCISTRSYQPKYCGVCMDNRCCIPYKSKTIDVSFQCPDGLGFSRQVLWINACFCNLSCRNPNDIFADLESYPDFSEIAN

SEQ ID NO: 584 - protein, 210 aa, Homo sapiens
MALPQMCDGSHLASTLRYCMTVSGTVVLVAGTLCFAWWSEGDATAQPGQLAPPTEYPVPEGPSPLLRSVSFVCCGAGGLLLLIGLLWSVKASIPGPPRWDPYHLSRDLYYLTVESSEKESCRTPKVVDIPTYEEAVSFPVAEGPPTPPAYPTEEALEPSGSRDALLSTQPAWPPPSYESISLALDAVSAETTPSATRSCSGLVQTARGGS

SEQ ID NO: 585 - protein, 99 aa, Homo sapiens
MAEGGFDPCECVCSHEHAMRRLINLLRQSQSYCTDTECLQELPGPSGDNGISVTMILVAWMVIALILFLLRPPNLRGSSLPGKPTSPHNGQDPPAPPVD

SEQ ID NO: 586 - protein, 1463 aa, Homo sapiens
QRWSQPSAAPGGSGSSLSLCLSATMVLESVVADLLNRFLGDYVENLNKSQLKLGIWGGNVALDNLQIKENALSELDVPFKVKAGQIDKLTLKIPWKNLYGEAVVATLEGLYLLVVPGASIKYDAVKEEKSLQDVKQKELSRIEEALQKAAEKGTHSGEFIYGLENFVYKDIKPGRKRKKHKKHFKKPFKGLDRSKDKPKEAKKDTFVEKLATQVIKNVQVKITDIHIKYEDDVTDPKRPLSFGVTLGELSLLTANEHWTPCILNEADKIIYKLIRLDSLSAYWNVNCSMSYQRSREQILDQLKNEILTSGNIPPNYQYIFQPISASAKLYMNPYAESELKTPKLDCNIEIQNIAIELTKPQYLSMIDLLESVDYMVRNAPYRKYKPYLPLHTNGRRWWKYAIDSVLEVHIRRYTQMWSWSNIKKHRQLLKSYKIAYKNKLTQSKVSEEIQKEIQDLEKTLDVFNIILARQQAQVEVIRSGQKLRKKSADTGEKRGGWFSGLWGKKESKKKDEESLIPETIDDLMTPEEKDKLFTAIGYSESTHNLTLPKQYVAHIMTLKLVSTSVTIRENKNIPEILKIQIIGLGTQVSQRPGAQALKVEAKLEHWYITGLRQQDIVPSLVASIGDTTSSLLKIKFETNPEDSPADQTLIVQSQPVEVIYDAKTVNAVVEFFQSNKGLDLEQITSATLMKLEEIKERTATGLTHIIETRKVLDLRINLKPSYLVVPQTGFHHEKSDLLILDFGTFQLNSKDQGLQKTTNSSLEEIMDKAYDKFDVEIKNVQLLFARAEETWKKCRFQHPSTMHILQPMDIHVELAKAMVEKDIRMARFKVSGGLPLMHVRISDQKMKDVLYLMNSIPLPQKSSAQSPERQVSSIPIISGGTKGLLGTSLLLDTVESESDDEYFDAEDGEPQTCKSMKGSELKKAAEVPNEELINLLLKFEIKEVILEFTKQQKEEDTILVFNVTQLGTEATMRTFDLTVVSYLKKISLDYHEIEGSKKKPLHLISSSDKPGLDLLKVEYIKADKNGPSFQTAFGKTEQTVKVAFSSLNLLLQTQALVASINYLTTIIPSDDQSISVAKEVQISTEKQQKNSTLPKAIVSSRDSDIIDFRLFAKLNAFCVIVCNEKNNIAEIKIQGLDSSLSLQSRKQSLFARLENIIVTDVDPKTVHKKAVSIMGNEVFRFNLDLYPDATEGDLYTDMSKVDGVLSLNVGCIQIVYLHKFLMSLLNFLNNFQTAKESLSAATAQAAERAATSVKDLAQRSFRVSINIDLKAPVIVIPQSSISTNAVVVDLGLIRVHNQFSLVSDEDYLNPPVIDRMDVQLTKLTLYRTVIQPGIYHPDIQLLHPINLEFLVNRNLAASWYHKVPVVEIKGHLDSMNVSLNQEDLNLLFRILTENLCEGTEDLDKVKPRVQETGEIKEPLEISISQDVHDSKNTLTTGVEEIRSVDIINMLLNFEIKEVVVTLM

SEQ ID NO: 587 - protein, 160 aa, Homo sapiens
MTDQQAEARSYLSEEMIAEFKAAFDMFDADGGGDISVKELGTVMRMLGQTPTKEELDAIIEEVDEDGSGTIDFEEFLVMMVRQMKEDAKGKSEEELAECFRIFDRNADGYIDPEELAEIFRASGEHVTDEEIESLMKDGDKNNDGRIDFDEFLKMMEGVQ

SEQ ID NO: 588 - protein, 376 aa, Homo sapiens [sequence omitted]

SEQ ID NO: 589 - protein, 699 aa, Homo sapiens
MTSLWREILLESLLGCVSWSLYHDLGPMIYYFPLQTLELTGLEGFSIAFLSPIFLTITPFWKLVNKKWMLTLLRIITIGSIASFQAPNAKLRLMVLALGVSSSLIVQAVTWWSGSHLQRYLRIWGFILGQIVLVVLRIWYTSLNPIWSYQMSNKVILTLSAIATLDRIGTDGDCSKPEEKKTGEVATGMASRPNWLLAGAAFGSLVFLTHWVFGEVSLVSRWAVSGHPHPGPDPNPFGGAVLLCLASGLMLPSCLWFRGTGLIWWVTGTASAAGLLYLHTWAAAVSGCVFAIFTASMWPQTLGHLINSGTNPGKTMTIAMIFYLLEIFFCAWCTAFKFVPGGVYARERSDVLLGTMMLIIGLNMLFGPKKNLDLLLQTKNSSKVLFRKSEKYMKLFLWLLVGVGLLGLGLRHKAYERKLGKVAPTKEVSAAIWPFRFGYDNEGWSSLERSAHLLNETGADFITILESDASKPYMGNNDLTMWLGEKLGFYTDFGPSTRYHTWGIMALSRYPIVKSEHHLLPSPEGEIAPAITLTVNISGKLVDFVVTHFGNHEDDLDRKLQAIAVSKLLKSSSNQVIFLGYITSAPGSRDYLQLTEHGNVKDIDSTDHDRWCEYIMYRGLIRLGYARISHAELSDSEIQMAKFRIPDDPTNYRDNQKVVIDHREVSEKIHFNPRFGSYKEGHNYENNHNFHMNTPKYFL

SEQ ID NO: 590 - protein, 458 aa, Homo sapiens; identical to SEQ ID NO: 543

SEQ ID NO: 591 - protein, 426 aa, Homo sapiens
MFRTKRSALVRRLWRSRAPGGEDEEEGAGGGGGGGELRGEGATDSRAHGAGGGGPGRAGCCLGKAVRGAKGHHHPHPPAAGAGAAGGAEADLKALTHSVLKKLKERQLELLLQAVESRGGTRTACLLLPGRLDCRLGPGAPAGAQPAQPPSSYSLPLLLCKVFRWPDLRHSSEVKRLCCCESYGKINPELVCCNPHHLSRLCELESPPPPYSRYPMDFLKPTADCPDAVPSSAETGGTNYLAPGGLSDSQLLLEPGDRSHWCVVAYWEEKTRVGRLYCVQEPSLDIFYDLPQGNGFCLGQLNSDNKSQLVQKVRSKIGCGIQLTREVDGVWVYNRSSYPIFIKSATLDNPDSRTLLVHKVFPGFSIKAFDYEKAYSLQRPNDHEFMQQPWTGFTVQISFVKGWGQCYTRQFISSCPCWLEVIFNSR

SEQ ID NO: 592 - protein, 228 aa, Homo sapiens
MLSRCRSGLLHVLGLSFLLQTRRPILLCSPRLMKPLVVFVLGGPGAGKGTQCARIVEKYGYTHLSAGELLRDERKNPDSQYGELIEKYIKEGKIVPVEITISLLKREMDQTMAANAQKNKFLIDGFPRNQDNLQGWNKTMDGKADVSFVLFFDCNNEICIERCLERGKSSGRSDDNRESLEKRIQTYLQSTKPIIDLYEEMGKVKKIDASKSVDEVFDEVVQIFDKEG

SEQ ID NO: 593 - protein, 770 aa, Homo sapiens; identical to SEQ ID NO: 565

SEQ ID NO: 594 - protein, 640 aa, Homo sapiens
MARRPRHSIYSSDEDDEDFEMCDHDYDGLLPKSGKRHLGKTRWTREEDEKLKKLVEQNGTDDWKVIANYLPNRTDVQCQHRWQKVLNPELIKGPWTKEEDQRVIELVQKYGPKRWSVIAKHLKGRIGKQCRERWHNHLNPEVKKTSWTEEEDRIIYQAHKRLGNRWAEIAKLLPGRTDNAIKNHWNSTMRRKVEQEGYLQESSKASQPAVATSFQKNSHLMGFAQAPPTAQLPATGQPTVNNDYSYYHISEAQNVSSHVPYPVALHVNIVNVPQPAAAAIQRHYNDEDPEKEKRIKELELLLMSTENELKGQQVLPTQNHTCSYPGWHSTTIADHTRPHGDSAPVSCLGEHHSTPSLPADPGSLPEESASPARCMIVHQGTILDNVKNLLEFAETLQFIDSFLNTSSNHENSDLEMPSLTSTPLIGHKLTVTTPFHRDQTVKTQKENTVFRTPAIKRSILESSPRTPTPFKHALAAQEIKYGPLKMLPQTPSHLVEDLQDVIKQESDESGIVAEFQENGPPLLKKIKQEVESPTDKSGNFFCSHHWEGDSLNTQLFTQTSPVADAPNILTSSVLMAPASEDEDNVLKAFTVPKNRSLASPLQPCSSTWEPASCGKMEEQMTSSSQARKYVNAFSARTLVM

SEQ ID NO: 595 - protein, 205 aa, Homo sapiens
MSAQRLISNRTSQQSASNSDYTWEYEYYEIGPVSFEGLKAHKYSIVIGFWVGLAVFVIFMFIVLTLLTKTGAPHQDNAESSEKRFRMNSFVSDFGRPLEPDKVFSRQGNEESRSLFHCYINEVERLDRAKACHQTTALDSDVQLQEAIRSSGQPEEELNRLMKFDIPNFVNTDQNYFGEDDLLISEPPIVLETKPLSQTSHKDLD

SEQ ID NO: 596 - protein, 354 aa, Homo sapiens
MTTAILERLSTLSVSGQQLRRLPKILEDGLPKMPCTVPETDVPQLFREPYIRTGYRPTGHEWRYYFFSLFQKHNEVVNVWTHLLAALAVLLRFWAFAEAEALPWASTHSLPLLLFILSSITYLTCSLLAHLLQSKSELSHYTFYFVDYVGVSVYQYGSALAHFFYSSDQAWYDRFWLFFLPAAAFCGWLSCAGCCYAKYRYRRPYPVMRKICQVVPAGLAFILDISPVAHRVALCHLAGCQEQAAWYHTLQILFFLVSAYFFSCPVPEKYFPGSCDIVGHGHQIFHAFLSICTLSQLEAILLDYQGRQEIFLQRHGPLSVHMACLSFFFLAACSAATAALLRHKVKARLTKKDS

SEQ ID NO: 597 - protein, 281 aa, Homo sapiens
MAVNVYSTSVTSENLSRHDMLAWVNDSLHLNYTKIEQLCSGAAYCQFMDMLFPGCVHLRKVKFQAKLEHEYIHNFKVLQAAFKKMGVDKIIPVEKLVKGKFQDNFEFIQWFKKFFDANYDGKDYNPLLARQGQDVAPPPNPGDQIFNKSKKLIGTAVPQRTSPTGPKNMQTSGRLSNVAPPCILRKNPPSARNGGHETDAQILELNQQLVDLKLTVDGLEKERDFYFSKLRDIELICQEHESENSPVISGIIGILYATEEGFAPPEDDEIEEHQQEDQDEY

SEQ ID NO: 598 - protein, 256 aa, Homo sapiens
MSRKKTPKSKGASTPAASTLPTANGARPARSGTALSGPDAPPNGPLQPGRPSLGGGVDFYDVAFKVMLVGDSGVGKTCLLVRFKDGAFLAGTFISTVGIDFRNKVLDVDGVKVKLQMWDTAGQERFRSVTHAYYRDAHALLLLYDVTNKASFDNIQAWLTEIHEYAQHDVALMLLGNKVDSAHERVVKREDGEKLAKEYGLPFMETSAKTGLNVDLAFTAIAKELKQRSMKAPSEPRFRLHDYVKREGRGASCCRP

SEQ ID NO: 599 - protein, 1478 aa, Homo sapiens
MASTNAESQLQRIIRDLQDAVTELSKEFQEAGEPITDDSTSLHKFSYKLEYLLQFDQKEKATLLGNKKDYWDYFCACLAKVKGANDGIRFVKSISELRTSLGKGRAFIRYSLVHQRLADTLQQCFMNTKVTSDWYYARSPFLQPKLSSDIVGQLYELTEVQFDLASRGFDLDAAWPTFARRTLTTGSSAYLWKPPSRSSSMSSLVSSYLQTQEMVSNFDLNSPLNNEALEGFDEMRLELDQLEVREKQLQERMQQLDRENQELRAAVSQQGEQLQTERERGRTAAEDNVRLTCLVAELQKQWEVTQATQNTVKELQTCLQALELGAAEKEEDYHTALRRLESMLQPLAQELEATRDSLDKKNQHLASFPGWLAMAQQKADSASDTKGRQEPIPSDAAQEMQELGEKLQALERERTKVEEVNRQQSAQLEQLVKELQLKEDARASLERLVKEMAPLQEELSGKGQEADQLWRRLQELLAHTSSWEEELAELRREKKQQQEEKELLEQEVRSLTRQLQFLETQLAQVSQHVSDLEEQKKQLIQDKDHLSQQVGMLERLAGPPGPELPVAGEKNEALVPVNSSLQEAWGKPEEEQRGLQEAQLDDTKVQEGSQEEELRQANRELEKELQNVVGRNQLLEGKLQALQADYQALQQRESAIQGSLASLEAEQASIRHLGDQMEASLLAVRKAKEAMKAQMAEKEAILQSKEGECQQLREEVEQCQQLAEARHRELRALESQCQQQTQLIEVLTAEKGQQGVGPPTDNEARELAAQLALSQAQLEVHQGEVQRLQAQVVDLQAKMRAALDDQDKVQSQLSMAEAVLREHKTLVQQLKEQNEALNRAHVQELLQCSEREGALQEERADEAQQREEELRALQEELSQAKCSSEEAQLEHAELQEQLHRANTDTAELGIQVCALTVEKERVEEALACAVQELQDAKEAASREREGLERQVAGLQQEKESLQEKLKAAKAAAGSLPGLQAQLAQAEQRAQSLQEAAHQELNTLKFQLSAEIMDYQSRLKNAGEECKSLRGQLEEQGRQLQAAEEAVEKLKATQADMGEKLSCTSNHLAECQAAMLRKDKEGAALREDLERTQKELEKATTKIQEYYNKLCQEVTNRERNDQKMLADLDDLNRTKKYLEERLIELLRDKDALWQKSDALEFQQKLSAEERWLGDTEANHCLDCKREFSWMVRRHHCRICGRIFCYYCCNNYVLSKHGGKKERCCRACFQKLSEGPGSPDSSGSGTSQGEPSPALSPASPGPQATGGQGANTDYRPPDDAVFDIITDEELCQIQESGSSLPETPTETDSLDPNAAEQDTTSTSLTPEDTEDMPVGQDSEICLLKSGELMIKVPLTVDEIASFGEGSRELFVRSSTYSLIPITVPEAALTISWVFSSDPKSISFSVVFQEAEDTPLDQCKVLIPTTRCNSHKENIQGQLKVRTPGIYMLIFDNTFSRFVSKKVFYHLTVDRPVIYDGSDFL

SEQ ID NO: 600 - protein, 722 aa, Homo sapiens
MEKNGNNRKLRVCVATCNRADYSKLAPIMFGIKTEPEFFELDVVVLGSHLIDDYGNTYRMIEQDDFDINTRLHTIVRGEDEAAMVESVGLALVKLPDVLNRLKPDIMIVHGDRFDALALATSAALMNIRILHIEGGEVSGTIDDSIRHAITKLAHYHVCCTRSAEQHLISMCEDHDRILLAGCPSYDKLLSAKNKDYMSIIRMWLGDDVKSKDYIVALQHPVTTDIKHSIKMFELTLDALISFNKRTLVLFPNIDAGSKEMVRVMRKKGIEHHPNFRAVKHVPFDQFIQLVAHAGCMIGNSSCGVREVGAFGTPVINLGTRQIGRETGENVLHVRDADTQDKILQALHLQFGKQYPCSKIYGDGNAVPRILKFLKSIDLQEPLQKKFCFPPVKENISQDIDHILETLSALAVDLGGTNLRVAIVSMKGEIVKKYTQFNPKTYEERINLILQMCVEAAAEAVKLNCRILGVGISTGGRVNPREGIVLHSTKLIQEWNSVDLRTPLSDTLHLPVWVDNDGNCAALAERKFGQGKGLENFVTLITGTGIGGGIIHQHELIHGSSFCAAELGHLVVSLDGPDCSCGSHGCIEAYASGMALQREAKKLHDEDLLLVEGMSVPKDEAVGALHLIQAAKLGNAKAQSILRTAGTALGLGVVNILHTMNPSLVILSGVLASHYIHIVKDVIRQQALSSVQDVDVVVSDLVDPALLGAASMVLDYTTRRIY

SEQ ID NO: 601 - protein, 478 aa, Homo sapiens
MASTTTCTRFTDEYQLFEELGKGAFSVVRRCMKIPTGQEYAAKIINTKKLSARDHQKLEREARICRLLKHPNIVRLHDSISEEGFHYLVFDLVTGGELFEDIVAREYYSEADASHCIQQILESVNHCHLNGIVHRDLKPENLLLASKSKGAAVKLADFGLAIEVQGDQQAWFGFAGTPGYLSPEVLRKDPYGKPVDMWACGVILYILLVGYPPFWDEDQHRLYQQIKAGAYDFPSPEWDTVTPEAKDLINKMLTINPAKRITASEALKHPWICQRSTVASMMHRQETVDCLKKFNARRKLKGAILTTMLATRNFSAAKSLLKKPDGVKESTESSNTTIEDEDVKARKQEIIKVTEQLIEAINNGDFEAYTKICDPGLTAFEPEALGNLVEGMDFHRFYFENALSKSNKPIHTIILNPHVHLVGDDAACIAYIRLTQYMDGSGMPKTMQSEETRVWHRRDGKWQNVHFHRSGSPTVPIK

SEQ ID NO: 602 - protein, 1077 aa, Homo sapiens
MPRRKQEQPKRLPSHVSRQEEAEGELSEGEHWYGNSSEAPSEASYGEVQENYKLSLEDRIQEQSTSPDTSLGSTTPSSHTLELVALDSEVLRDSLQCQDHLSPGVSSLCDDDPGSNKPLSSNLRRLLEAGSLKLDAAATANGRVESPVNVGSNLSFSPPSHHARQLSVLARKLAEKQEQNDQYTPSNRFIWNQGKWLPNSTTTCSLSPDSAILKLKAAANAVLQDKSLTRTEETMRFESLSSPFSSQSASSTLAALSKKVSERSLTPGQEHPPPASSFLSLASMTSSAALLKEVAARAAGSLLAEKSSLLPEDPLPPPPSEKKPEKVTPPPPPPPPPPPPPPPQSLELLLLPVPKGRVSKPSNSASEEESGKPFQCPICGLVIKRKSYWKRHMVIHTGLKSHQCPLCPFRCARKDNLKSHMKVHQHQDRGETFQCQLCPFTSSRHFSLKLHMRCHQHFLRTEAKVKEEIPDPDVKGSPHLSDSACLGQQREGGGTELVGTMMTSNTPERTSQGGAGVSPLLVKEEPKEDNGLPTSFTLNAADRPANHTKLKDPSEYVANSASALFSQDISVKMASDFLMKLSAANQKEPMNLNFKVKEEPKEGESLSTTLPRSSYVFSPESEVSAPGVSEDALKPQEGKGSVLRRDVSVKAASELLMKLSAESYKETQMVKIKEEPMEVDIQDSHVSISPSRNVGYSTLIGREKTEPLQKMPEGRVPPERNLFSQDISVKMASELLFQLSEKVSKEHNHTKENTIRTTTSPFFSEDTFRQSPFTSNSKELLPSDSVLHGRISAPETEKIVLEAGNGLPSWKFNDQLFPCDVCGKVFGRQQTLSRHLSLHTEERKYKCHLCPYAAKCRANLNQHLTVHSVKLVSTDTEDIVSAVTSEGSDGKKHPYYYSCHVCGFGTELNVQFVSHMSLHVDKEQWMFSICCTACDFVTMEEAEIKTHIGTKHTGEDRKTPSESNSPSSSSLSALSDSANSKDDSDGSQKNKGGNNLLVISVMPGSQPSLNSEEKPEKGFECVFCNFVCKTKNMFERHLQIHLITRMFECDVCHKFMKTPEQLLEHKKCHTVPTGGLK

SEQ ID NO: 603 - protein, 526 aa, Homo sapiens
MDVRFYPPPAQPAAAPDAPCLGPSPCLDPYYCNKFDGENMYMSMTEPSQDYVPASQSYPGPSLESEDFNIPPITPPSLPDHSLVHLNEVESGYHSLCHPMNHNGLLPFHPQNMDLPEITVSNMLGQDGTLLSNSISVMPDIRNPEGTQYSSHPQMAAMRPRGQPADIRQQPGMMPHGQLTTINQSQLSAQLGLNMGGSNVPHNSPSPPGSKSATPSPSSSVHEDEGDDTSKINGGEKRPASDMGKKPKTPKKKKKKDPNEPQKPVSAYALFFRDTQAAIKGQNPNATFGEVSKIVASMWDGLGEEQKQVYKKKTEAAKKEYLKQLAAYRASLVSKSYSEPVDVKTSQPPQLINSKPSVFHGPSQAHSALYLSSHYHQQPGMNPHLTAMHPSLPRNIAPKPNNQMPVTVSIANMAVSPPPPLQISPPLHQHLNMQQHQPLTMQQPLGNQLPMQVQSALHSPTMQQGFTLQPDYQTIINPTSTAAQVVTQAMEYVRSGCRNPPPQPVDWNNDYCSSGGMQRDKALYLT

SEQ ID NO: 604 - protein, 617 aa, Homo sapiens
MLVPLAKLSCLAYQCFHALKIKKNYLPLCAIRWSSTSTVPRITTHYTIYPRDKDKRWEGVNMERFAEEADVVIVGAGPAGLSAAVRLKQLAVAHEKDIRVCLVEKAAQIGAHTLSGACLDPGAFKELFPDWKEKGAPLNTPVTEDRFGILTEKYRIPVPILPGLPMNNHGNYIVRLGHLVSWMGEQAEALGVEVYPGYAAAEVLFHDDGSVKGIATNDVGIQKDGAPKATFERGLELHAKVTIFAEGCHGHLAKQLYKKFDLRANCEPQTYGIGLKELWVIDEKNWKPGRVDHTVGWPLDRHTYGGSFLYHLNEGEPLVALGLVVGLDYQNPYLSPFREFQRWKHHPSIRPTLEGGKRIAYGARALNEGGFQSIPKLTFPGGLLIGCSPGFMNVPKIKGTHTAMKSGILAAESIFNQLTSENLQSKTIGLHVTEYEDNLKNSWVWKELYSVRNIRPSCHGVLGVYGGMIYTGIFYWILRGMEPWTLKHKGSDFERLKPAKDCTPIEYPKPDGQISFDLLSSVALSGTNHEHDQPAHLTLRDDSIPVNRNLSIYDGPEQRFCPAGVYEFVPVEQGDGFRLQINAQNCVHCKTCDIKDPSQNINWVVPEGGGGPAYNGM

SEQ ID NO: 605 - protein, 405 aa, Homo sapiens
MERWPWPSGGAWLLVAARALLQLLRSDLRLGRPLLAALALLAALDWLCQRLLPPPAALAVLAAAGWIALSRLARPQRLPVATRAVLITGCDSGFGKETAKKLDSMGFTVLATVLELNSPGAIELRTCCSPRLRLLQMDLTKPGDISRVLEFTKAHTTSTGLWGLVNNAGHNEVVADAELSPVATFRSCMEVNFFGALELTKGLLPLLRSSRGRIVTVGSPAGDMPYPCLGAYGTSKAAVALLMDTFSCELLPWGVKVSIIQPGCFKTESVRNVGQWEKRKQLLLANLPQELLQAYGKDYIEHLHGQFLHSLRLAMSDLTPVVDAITDALLAARPRRRYYPGQGLGLMYFIHYYLPEGLRRRFLQAFFISHCLPRALQPGQPGTTPPQDAAQGPNLSPGPSPAVAR

SEQ ID NO: 606 - protein, 1088 aa, Homo sapiens
MDFLRLYLPGLHQALRGALDSLGTFVSYLLGDAVPTVEREAQAAEELGVVAVGKTGKIVEEEAQEDLEGLRGSQNEGAGRLRGPGDDRRHEVGSSAVEQTWGWGDGSSHGSQAERQDSGAGETAKAARCQEPSAHLEARKKSKAGSGACQDRSGQAQERQESHEQEVNREERLRSWEQEEEEEEVRAREPGMARGAESEWTWHGETEGKAGAVGPKAAGDNREMEQGVREADAGETEEPGAEGAGKGEEVVVVEKACESTRAWGTWGPGAEPEDWGILGREEARTTPGREEARAILDGEEARTISGGEEAETASGGEEAETASGGEEAGTASGGEEAGISSGGEAGTASGGEEAGTASGGDEAWTTSGKEEADLLGVRQTQYGAVPGERLLEATGKVWVLEEEGDEEREAEVSPFPKQAQVLGTERTEEAAESQTAGREAVGGQEAGESFEGQVDLRGKEAEMRQDLGIRADRARMEELVQAEEAQEERGSSRDPVAELPSDGEAEGTADLEATPEARPEEELTGEESEAAQTSCGLLGVEWGGLTHSVTKGQGPELMGGAQTPTKQPEEREAGEVELMGVLALSKEEQERSLEAGPRHAGSVKPEASEAFPGAWENRTRKDMERGNTQEDAADGEQREEEETAGGQTLAAEAEGDRESELSEVPEAGGEGLTTQDAGCGTEEGEASVSENQELDGSTGADAGPCPSLGEAYARETEDEEAEADRTSRRGWRLQAVAVGLPDREDAQTGSVAAGIMGGDVVPHISAAGAGEALEGALGQGWDSKEKEEAAAGEHAGGQEFGLEGSAEEEVTGRGSQVEAFESREGGPWGGRVEAEESAGAEDSCGLDPAGSQTARAEGMGAMVEAGGLLEKWTLLEEEAVGWQEREQREDSEGRCGDYHPEGEAPRLLDAEGLMVTGGRRAEAKETEPESLEHVRGQEEQPTHQAPAEAAPESVGEAETAEAMGSARGGAANSWSEAPLPGSLLDVSVPRSRVHLSRSSSQRRSRPSFRRTPAWEQQEEPPAPNPPEEELSAPEQRPLQLEEPLEPSPLRHDGTPVPARRRPLGHGFGLAHPGMMQELQARLGRPKPQ

SEQ ID NO: 607 - protein, 1189 aa, Homo sapiens
MESTPSFLKGTPTWEKTAPENGIVRQEPGSPPRDGLHHGPLCLGEPAPFWRGVLSTPDSWLPPGFPQGPKDMLPLVEGEGPQNGERKVNWLGSKEGLRWKEAMLTHPLAFCGPACPPRCGPLMPEHSGGHLKSDPVAFRPWHCPFLLETKILERAPFWVPTCLPPYLVSGLPPEHPCDWPLTPHPWVYSGGQPKVPSAFSLGSKGFYYKDPSIPRLAKEPLAAAEPGLFGLNSGGHLQRAGEAERPSLHQRDGEMGAGRQQNPCPLFLGQPDTVPWTSWPACPPGLVHTLGNVWAGPGDGNLGYQLGPPATPRCPSPEPPVTQRGCCSSYPPTKGGGLGPCGKCQEGLEGGASGASEPSEEVNKASGPRACPPSHHTKLKKTWLTRHSEQFECPRGCPEVEERPVARLRALKRAGSPEVQGAMGSPAPKRPPDPFPGTAEQGAGGWQEVRDTSIGNKDVDSGQHDEQKGPQDGQASLQDPGLQDIPCLALPAKLAQCQSCAQAAGEGGGHACHSQQVRRSPLGGELQQEEDTATNSSSEEGPGSGPDSRLSTGLAKHLLSGLGDRLCRLLRREREALAWAQREGQGPAVTEDSPGIPRCCSRCHHGLFNTHWRCPRCSHRLCVACGRVAGTGRAREKAGFQEQSAEECTQEAGHAACSLMLTQFVSSQALAELSTAMHQVWVKFDIRGHCPCQADARVWAPGDAGQQKESTQKTPPTPQPSCNGDTHRTKSIKEETPDSAETPAEDRAGRGPLPCPSLCELLASTAVKLCLGHERIHMAFAPVTPALPSDDRITNILDSIIAQVVERKIQEKALGPGLRAGPGLRKGLGLPLSPVRPRLPPPGALLWLQEPQPCPRRGFHLFQEHWRQGQPVLVSGIQRTLQGNLWGTEALGALGGQVQALSPLGPPQPSSLGSTTFWEGFSWPELRPKSDEGSVLLLHRALGDEDTSRVENLAASLPLPEYCALHGKLNLASYLPPGLALRPLEPQLWAAYGVSPHRGHLGTKNLCVEVADLVSILVHADTPLPAWHRAQKDFLSGLDGEGLWSPGSQVSTVWHVFRAQDAQRIRRFLQMVCPAGAGALEPGAPGSCYLDAGLRRRLREEWGVSCWTLLQAPGEAVLVPAGAPHQVQGLVSTVSVTQHFLSPETSALSAQLCHQGPSLPPDCHLLYAQMDWAVFQAVKVAVGTLQEAK

SEQ ID NO: 608 - protein, 854 aa, Homo sapiens
MPGGGPQGAPAAAGGGGVSHRAGSRDCLPPAACFRRRRLARRPGYMRSSTGPGIGFLSPAVGTLFRFPGGVSGEESHHSESRARQCGLDSRGLLVRSPVSKSAAAPTVTSVRGTSAHFGIQLRGGTRLPDRLSWPCGPGSAGWQQEFAAMDSSETLDASWEAACSDGARRVRAAGSLPSAELSSNSCSPGCGPEVPPTPPGSHSAFTSSFSFIRLSLGSAGERGEAEGCPPSREAESHCQSPQEMGAKAASLDGPHEDPRCLSRPFSLLATRVSADLAQAARNSSRPERDMHSLPDMDPGSSSSLDPSLAGCGGDGSSGSGDAHSWDTLLRKWEPVLRDCLLRNRRQMEVISLRLKLQKLQEDAVENDDYDKAETLQQRLEDLEQEKISLHFQLPSRQPALSSFLGHLAAQVQAALRRGATQQASGDDTHTPLRMEPRLLEPTAQDSLHVSITRRDWLLQEKQQLQKEIEALQARMFVLEAKDQQLRREIEEQEQQLQWQGCDLTPLVGQLSLGQLQEVSKALQDTLASAGQIPFHAEPPETIRSLQERIKSLNLSLKEITTKVCMSEKFCSTLRKKVNDIETQLPALLEAKMHAISGNHFWTAKDLTEEIRSLTSEREGLEGLLSKLLVLSSRNVKKLGSVKEDYNRLRREVEHQETAYETSVKENTMKYMETLKNKLCSCKCPLLGKVWEADLEACRLLIQSLQLQEARGSLSVEDERQMDDLEGAAPPIPPRLHSEDKRKTPLKVLEEWKTHLIPSLHCAGGEQKEESYILSAELGEKCEDIGKKLLYLEDQLHTAIHSHDEDLIQSLRRELQMVKETLQAMILQLQPAKEAGEREAAASCMTAGVHEAQA

SEQ ID NO: 609 - protein, 390 aa, Homo sapiens
MAQRYDDLPHYGGMDGVGIPSTMYGDPHAARSMQPVHHLNHGPPLHSHQYPHTAHTNAMAPSMGSSVNDALKRDKDAIYGHPLFPLLALIFEKCELATCTPREPGVAGGDVCSSESFNEDIAVFAKQIRAEKPLFSSNPELDNLMIQAIQVLRFHLLELEKVHELCDNFCHRYISCLKGKMPIDLVIDDREGGSKSDSEDITRSANLTDQPSWNRDHDDTASTRSGGTPGPSSGGHTSHSGDNSSEQGDGLDNSVASPSTGDDDDPDKDKKRHKKRGIFPKVATNIMRAWLFQHLTHPYPSEEQKKQLAQDTGLTILQVNNWFINARRRIVQPMIDQSNRAVSQGTPYNPDGQPMGGFVMDGQQHMGIRAPGPMSGMGMNMGMEGQWHYM

SEQ ID NO: 610 - protein, 678 aa, Homo sapiens
MACLMAAFSVGTAMNASSYSAEMTEPKSVCVSVDEVVSSNMEATETDLLNGHLKKVDNNLTEAQRFSSLPRRAAVNIEFRDLSYSVPEGPWWRKKGYKTLLKGISGKFNSGELVAIMGPSGAGKSTLMNILAGYRETGMKGAVLINGLPRDLRCFRKVSCYIMQDDMLLPHLTVQEAMMVSAHLKLQEKDEGRREMVKEILTALGLLSCANTRTGSLSGGQRKRLAIALELVNNPPVMFFDEPTSGLDSASCFQVVSLMKGLAQGGRSIICTIHQPSAKLFELFDQLYVLSQGQCVYRGKVCNLVPYLRDLGLNCPTYHNPADFVMEVASGEYGDQNSRLVRAVREGMCDSDHKRDLGGDAEVNPFLWHRPSEEVKQTKRLKGLRKDSSSMEGCHSFSASCLTQFCILFKRTFLSIMRDSVLTHLRITSHIGIGLLIGLLYLGIGNEAKKVLSNSGFLFFSMLFLMFAALMPTVLTFPLEMGVFLREHLNYWYSLKAYYLAKTMADVPFQIMFPVAYCSIVYWMTSQPSDAVRFVLFAALGTMTSLVAQSLGLLIGAASTSLQVATFVGPVTAIPVLLFSGFFVSFDTIPTYLQWMSYISYVRYGFEGVILSIYGLDREDLHCDIDETCHFQKSEAILRELDVENAKLYLDFIVLGIFFISLRLIAYFVLRYKIRAER

SEQ ID NO: 611 - protein, 527 aa, Homo sapiens; identical to SEQ ID NO: 544

SEQ ID NO: 612 - protein, 356 aa, Homo sapiens
MPEGEDFGPGKSWEVINSKPDERPRLSHCIAESWMNFSIFLQEMSLFKQQSPGKFCLLVCSVCTFFTILGSYIPGVILSYLLLLCAFLCPLFKCNDIGQKIYSKIKSVLLKLDFGIGEYINQKKRERSEADKEKSHKDDSELDFSALCPKISLTVAAKELSVSDTDVSEVSWTDNGTFNLSEGYTPQTDTSDDLDRPSEEVFSRDLSDFPSLENGMGTNDEDELSLGLPTELKRKKEQLDSGHRPSKETQSAAGLTLPLNSDQTFHLMSNLAGDVITAAVTAAIKDQLEGVQQALSQAAPIPEEDTDTEEGDDFELLDQSELDQIESELGLTQDQEAEAQQNKKSSGFLSNLLGGH

SEQ ID NO: 613 - protein, 367 aa, Homo sapiens
MAPSGPGSSARRRCRRVLYWIPVVFITLLLGWSYYAYAIQLCIVSMENTGEQVVCLMAYHLLFAMFVWSYWKTIFTLPMNPSKEFHLSYAEKDLLEREPRGEAHQEVLRRAAKDLPIYTRTMSGAIRYCDRCQLIKPDRCHHCSVCDKCILKMDHHCPWVNNCVGFSNYKFFLLFLAYSLLYCLFIAATDLQYFIKFWTNGLPDTQAKFHIMFLFFAAAMFSVSLSSLFGYHCWLVSKNKSTLEAFRSPVFRHGTDKNGFSLGFSKNMRQVFGDEKKYWLLPIFSSLGDGCSFPTCLVNQDPEQASTPAGLNSTAKNLENHQFPAKPLRESQSHLLTDSQSWTESSINPGKCKAGMSNPALTMENET

SEQ ID NO: 614 - protein, 620 aa, Homo sapiens
MLSAIYTVLAGLLFLPLLVNLCCPYFFQDIGYFLKVAAVGRRVRSYGQRRPARTILRAFLEKARQTPHKPFLLFRDETLTYAQVDRRSNQVARALHDHLGLRQGDCVALLMGNEPAYVWLWLGLVKLGCAMACLNYNIRAKSLLHCFQCCGAKVLLVSPELQAAVEEILPSLKKDDVSIYYVSRTSNTDGIDSFLDKVDEVSTEPIPESWRSEVTFSTPALYIYTSGTTGLPKAAMITHQRIWYGTGLTFVSGLKADDVIYITLPFYHSAALLIGIHGCIVAGATLALRTKFSASQFWDDCRKYNVTVIQYIGELLRYLCNSPQKPNDRDHKVRLALGNGLRGDVWRQFVKRFGDICIYEFYAATEGNIGFMNYARKVGAVGRVNYLQKKIITYDLIKYDVEKDEPVRDENGYCVRVPKGEVGLLVCKITQLTPFNGYAGAKAQTEKKKLRDVFKKGDLYFNSGDLLMVDHENFIYFHDRVGDTFRWKGENVATTEVADTVGLVDFVQEVNVYGVHVPDHEGRIGMASIKMKENHEFDGKKLFQHIADYLPSYARPRFLRIQDTIEITGTFKHRKMTLVEEGFNPAVIKDALYFLDDTAKMYVPMTEDIYNAISAKTLKL

SEQ ID NO: 615 - protein, 788 aa, Homo sapiens
MVSWGRFICLVVVTMATLSLARPSFSLVEDTTLEPEEPPTKYQISQPEVYVAAPGESLEVRCLLKDAAVISWTKDGVHLGPNNRTVLIGEYLQIKGATPRDSGLYACTASRTVDSETWYFMVNVTDAISSGDDEDDTDGAEDFVSENSNNKRAPYWTNTEKMEKRLHAVPAANTVKFRCPAGGNPMPTMRWLKNGKEFKQEHRIGGYKVRNQHWSLIMESVVPSDKGNYTCVVENEYGSINHTYHLDVVERSPHRPILQAGLPANASTVVGGDVEFVCKVYSDAQPHIQWIKHVEKNGSKYGPDGLPYLKVLKVLKAAGVNTTDKEIEVLYIRNVTFEDAGEYTCLAGNSIGISFHSAWLTVLPAPGREKEITASPDYLEIAIYCIGVFLIACMVVTVILCRMKNTTKKPDFSSQPAVHKLTKRIPLRRQVSAESSSSMNSNTPLVRITTRLSSTADTPMLAGVSEYELPEDPKWEFPRDKLTLGKPLGEGCFGQVVMAEAVGIDKDKPKEAVTVAVKMLKDDATEKDLSDLVSEMEMMKMIGKHKNIINLLGACTQDGPLYVIVEYASKGNLREYLRARRPPGMEYSYDINRVPEEQMTFKDLVSCTYQLARGMEYLASQKCIHRDLAARNVLVTENNVMKIADFGLARDINNIDYYKKTTNGRLPVKWMAPEALFDRVYTHQSDVWSFGVLMWEIFTLGGSPYPGIPVEELFKLLKEGHRMDKPANCTNELYMMMRDCWHAVPSQRPTFKQLVEDLDRILTLTTNEEYLDLSQPLEPYSPCYPDPR

SEQ ID NO: 616 - protein, 466 aa, Homo sapiens
MALSAAYRFVLTEGQKRYFEKLVIYCDQYASLIPVSFVLGFYVTLVVNRWWSQYLCMPLPDALMCVVAGTVHGRDDRGRLYRRTLMRYAGLSAVLILRSVSTAVFKRFPTIDHVVEAGFMTREERKKFENLNSSYNKYWVPCVWFSNLAAQARREGRIRDNSALKLLLEELNVFRGKCGMLFHYDWISVPLVYTQVVTIALYSYFLACLIGRQFLDPAQGYKDHDLDLCVPIFTLLQFFFYAGWLKVAEQLINPFGEDDDDFETNFLIDRNFQVSMLAVDEMYDDLAVLEKDLYWDAAEARAPYTAATVFQLRQPSFQGSTFDITLAKEDMQFQRLDGLDGPMGGAPGDFLQRLLPAGAGMVAGGPLGRRLSFLLRKNSCVSEASTGASCSCAVVPEGAAPECSCGDPLLDPGLPEPEAPPPAGPEPLTLIPGPVEPFSIVTMPGPRGPAPPWLPSPIGEEEENLA

SEQ ID NO: 617 - protein, 129 aa, Homo sapiens
MRRRGEIDMATEGDVELELETETSGPERPPEKPRKHDSGAADLERVTDYAEEKEIQSSNLETAMSVIGDRRSREQKAKQEREKELAKVTIKKEDLELIMTEMEISRAAAERSLREHMGNVVEALIALTN

SEQ ID NO: 618 - protein, 759 aa, Homo sapiens
MESSPFNRRQWTSLSLRVTAKELSLVNKNKSSAIVEIFSKYQKAAEETNMEKKRSNTENLSQHFRKGTLTVLKKKWENPGLGAESHTDSLRNSSTEIRHRADHPPAEVTSHAASGAKADQEEQIHPRSRLRSPPEALVQGRYPHIKDGEDLKDHSTESKKMENCLGESRHEVEKSEISENTDASGKIEKYNVPLNRLKMMFEKGEPTQTKILRAQSRSASGRKISENSYSLDDLEIGPGQLSSSTFDSEKNESRRNLELPRLSETSIKDRMAKYQAAVSKQSSSTNYTNELKASGGEIKIHKMEQKENVPPGPEVCITHQEGEKISANENSLAVRSTPAEDDSRDSQVKSEVQQPVHPKPLSPDSRASSLSESSPPKAMKKFQAPARETCVECQKTVYPMERLLANQQVFHISCFRCSYCNNKLSLGTYASLHGRIYCKPHFNQLFKSKGNYDEGFGHRPHKDLWASKNENEEILERPAQLANARETPHSPGVEDAPIAKVGVLAASMEAKASSQQEKEDKPAETKKLRIAWPPPTELGSSGSALEEGIKMSKPKWPPEDEISKPEVPEDVDLDLKKLRRSSSLKERSRPFTVAASFQSTSVKSPKTVSPPIRKGWSMSEQSEESVGGRVAERKQVENAKASKKNGNVGKTTWQNKESKGETGKRSKEGHSLEMENENLVENGADSDEDDNSFLKQQSPQEPKSLNWSSFVDNTFAEEFTTQNQKSQDVELWEGEVVKELSVEEQIKRNRYYDEDEDEE

SEQ ID NO: 619 - protein, 365 aa, Homo sapiens
MDIIETAKLEEHLENQPSDPTNTYARPAEPVEEENKNGNGKPKSLSSGLRKGTKKYPDYIQIAMPTESRNKFPLEWWKTGIAFIYAVFNLVLTTVMITVVHERVPPKELSPPLPDKFFDYIDRVKWAFSVSEINGIILVGLWITQWLFLRYKSIVGRRFCFIIGTLYLYRCITMYVTTLPVPGMHFQCAPKLNGDSQAKVQRILRLISGGGLSITGSHILCGDFLFSGHTVTLTLTYLFIKEYSPRHFWWYHLICWLLSAAGIICILVAHEHYTIDVIIAYYITTRLFWWYHSMANEKNLKVSSQTNFLSRAWWFPIFYFFEKNVQGSIPCCFSWPLSWPPGCFKSSCKKYSRVQKIGEDNEKST

SEQ ID NO: 620 - protein, 827 aa, Homo sapiens
MRGCLRLALLCALPWLLLAASPGHPAKSPRQPPAPRRDPFDAARGADFDHVYSGVVNLSTENIYSFNYTSQPDQVTAVRVYVNSSSENLNYPVLVVVRQQKEVLSWQVPLLFQGLYQRSYNYQEVSRTLCPSEATNETGPLQQLIFVDVASMAPLGAQYKLLVTKLKHFQLRTNVAFHFTASPSQPQYFLYKFPKDVDSVIIKVVSEMAYPCSVVSVQNIMCPVYDLDHNVEFNGVYQSMTKKAAITLQKKDFPGEQFFVVFVIKPEDYACGGSFFIQEKENQTWNLQRKKNLEVTIVPSIKESVYVKSSLFSVFIFLSFYLGCLLVGFVHYLRFQRKSIDGSFGSNDGSGNMVASHPIAASTPEGSNYGTIDESSSSPGRQMSSSDGGPPGQSDTDSSVEESDFDTMPDIESDKNIIRTKMFLYLSDLSRKDRRIVSKKYKIYFWNIITIAVFYALPVIQLVITYQTVVNVTGNQDICYYNFLCAHPLGVLSAFNNILSNLGHVLLGFLFLLIVLRRDILHRRALEAKDIFAVEYGIPKHFGLFYAMGIALMMEGVLSACYHVCPNYSNFRFDTSFMYMIAGLCMLKLYQTRHPDINASAYSAYASFAVVIMVTVLGVVFGKNDVWFWVIFSAIHVLASLALSTQIYYMGRFKIDLGIFRRAAMVFYTDCIQQCSRPLYMDRMVLLVVGNLVNWSFALFGLIYRPRDFASYMLGIFICNLLLYLAFYIIMKLRSSEKVLPVPLFCIVATAVMWAAALYFFFQNLSSWEGTPAESREKNRECILLDFFDDHDIWHFLSATALFFSFLVLLTLDDDLDVVRRDQIPVF

SEQ ID NO: 621 - protein, 164 aa, Homo sapiens
MDGSGEQPRGGGPTSSEQIMKTGALLLQGFIQDRAGRMGGEAPELALDPVPQDASTKKLSECLKRIGDELDSNMELQRMIAAVDTDSPREVFFRVAADMFSDGNFNWGRVVALFYFASKLVLKAGVKWRDLGSLQPLPPGFKRFTCLSIPRSWDYRPCAPRCRN

SEQ ID NO: 622 - protein, 313 aa, Homo sapiens
METGPEDPSSMPEESSPRRTPQSIPYQDLPHLVNADGQYLFCRYWKPTGTPKALIFVSHGAGEHSGRYEELARMLMGLDLLVFAHDHVGHGQSEGERMVVSDFHVFVRDVLQHVDSMQKDYPGLPVFLLGHSMGGAIAILTAAERPGHFAGMVLISPLVLANPESATTFKVLAAKVLNLVLPNLSLGPIDSSVLSRNKTEVDIYNSDPLICRAGLKVCFGIQLLNAVSRVERALPKLTVPFLLLQGSADRLCDSKGAYLLMELAKSQDKTLKIYEGAYHVLHKELPEVTNSVFHEINMWVSQRTATAGTASPP

SEQ ID NO: 623 - protein, 337 aa, Homo sapiens
MAAPRDNVTLLFKLYCLAVMTLMAAVYTIALRYTRTSDKELYFSTTAVCITEVIKLLLSVGILAKETGSLGRFKASLRENVLGSPKELLKLSVPSLVYAVQNNMAFLALSNLDAAVYQVTYQLKIPCTALCTVLMLNRTLSKLQWVSVFMLCAGVTLVQWKPAQATKVVVEQNPLLGFGAIAIAVLCSGFAGVYFEKVLKSSDTSLWVRNIQMYLSGIIVTLAGVYLSDGAEIKEKGFFYGYTYYVWFVIFLASVGGLYTSVVVKYTDNIMKGFSAAAAIVLSTIASVMLFGLQITLTFALGTLLVCVSIYLYGLPRQDTTSIQQGETASKERVIGV

SEQ ID NO: 624 - protein, 616 aa, Homo sapiens
MAPRARRRRPLFALLLLCALLARLQVALQIAPPCTSEKHYEHLGRCCNKCEPGKYMSSKCTTTSDSVCLPCGPDEYLDSWNEEDKCLLHKVCDTGKALVAVVAGNSTTPRRCACTAGYHWSQDCECCRRNTECAPGLGAQHPLQLNKDTVCKPCLAGYFSDAFSSTDKCRPWTNCTFLGKRVEHHGTEKSDAVCSSSLPARKPPNEPHVYLPGLIILLLFASVALVAAIIFGVCYRKKGKALTANLWHWINEACGRLSGDKESSGDSCVSTHTANFGQQGACEGVLLLTLEEKTFPEDMCYPDQGGVCQGTCVGGGPYAQGEDARMLSLVSKTEIEEDSFRQMPTEDEYMDRPSQPTDQLLFLTEPGSKSTPPFSEPLEVGENDSLSQCFTGTQSTVGSESCNCTEPLCRTDWTPMSSENYLQKEVDSGHCPHWAASPSPNWADVCTGCRNPPGEDCEPLVGSPKRGPLPQCAYGMGLPPEEEASRTEARDQPEDGADGRLPSSARAGAGSGSSPGGQSPASGNVTGNSNSTFISSGQVMNFKGDIIVVYVSQTSQEGAAAAAEPMGRPVQEETLARRDSFAGNGPRFPDPCGGPEGLREPEKASRPVQEQGGAKA

SEQ ID NO: 625 - protein, 753 aa, Homo sapiens
MERRAWSLQCTAFVLFCAWCALNSAKAKRQFVNEWAAEIPGGPEAASAIAEELGYDLLGQIGSLENHYLFKHKNHPRRSRRSAFHITKRLSDDDRVIWAEQQYEKERSKRSALRDSALNLFNDPMWNQQWYLQDTRMTAALPKLDLHVIPVWQKGITGKGVVITVLDDGLEWNHTDIYANYDPEASYDFNDNDHDPFPRYDPTNENKHGTRCAGEIAMQANNHKCGVGVAYNSKVGGIRMLDGIVTDAIEASSIGFNPGHVDIYSASWGPNDDGKTVEGPGRLAQKAFEYGVKQGRQGKGSIFVWASGNGGRQGDNCDCDGYTDSIYTISISSASQQGLSPWYAEKCSSTLATSYSSGDYTDQRITSADLHNDCTETHTGTSASAPLAAGIFALALEANPNLTWRDMQHLVVWTSEYDPLANNPGWKKNGAGLMVNSRFGFGLLNAKALVDLADPRTWRSVPEKKECVVKDNDFEPRALKANGEVIIEIPTRACEGQENAIKSLEHVQFEATIEYSRRGDLHVTLTSAAGTSTVLLAERERDTSPNGFKNWDFMSVHTWGENPIGTWTLRITDMSGRIQNEGRIVNWKLILHGTSSQPEHMKQPRVYTSYNTVQNDRRGVEKMVDPGEEQPTQENPKENTLVSKSPSSSSVGGRRDELEEGAPSQAMLRLLQSAFSKNSPPKQSPKKSPSAKLNIPYENFYEALEKLNKPSQLKDSEDSLYNDYVDVFYNTKPYKHRDDRLLQALVDILNEEN

SEQ ID NO: 626 - protein, 611 aa, Homo sapiens; identical to SEQ ID NO: 540

SEQ ID NO: 627 - protein, 213 aa, Homo sapiens
MAPAQRPLLPLLLLLLPLPPPPFARAEDAARANSDRYAVYWNRSNPRFHAGAGDDGGGYTVEVSINDYLDIYCPHYGAPLPPAERMEHYVLYMVNGEGHASCDHRQRGFKRWECNRPAAPGGPLKFSEKFQLFTPFSLGFEFRPGHEYYYISATPPNAVDRPCLRLKVYVRPTNETLYEAPEPIFTSNNSCSSPGGCRLFLSTIPVLWTLLGS

SEQ ID NO: 628 - protein, 984 aa, Homo sapiens
METKGYHSLPEGLDMERRWGQVSQAVERSSLGPTERTDENNYMEIVNVSCVSGAIPNNSTQGSSKEKQELLPCLQQDNNRPGILTSDIKTELESKELSATVAESMGLYMDSVRDADYSYEQQNQQGSMSPAKIYQNVEQLVKFYKGNGHRPSTLSCVNTPLRSFMSDSGSSVNGGVMRAIVKSPIMCHEKSPSVCSPLNMTSSVCSPAGINSVSSTTASFGSFPVHSPITQGTPLTCSPNAENRGSRSHSPAHASNVGSPLSSPLSSMKSSISSPPSHCSVKSPVSSPNNVTLRSSVSSPANINNSRCSVSSPSNTNNRSTLSSPAASTVGSICSPVNNAFSYTASGTSAGSSTLRDVVPSPDTQEKGAQEVPFPKTEEVESAISNGVTGQLNIVQYIKPEPDGAFSSSCLGGNSKINSDSSFSVPIKQESTKHSCSGTSFKGNPTVNPFPFMDGSYFSFMDDKDYYSLSGILGPPVPGFDGNCEGSGFPVGIKQEPDDGSYYPEASIPSSAIVGVNSGGQSFHYRIGAQGTISLSRSARDQSFQHLSSFPPVNTLVESWKSHGDLSSRRSDGYPVLEYIPENVSSSTLRSVSTGSSRPSKICLVCGDEASGCHYGVVTCGSCKVFFKRAVEGQHNYLCAGRNDCIIDKIRRKNCPACRLQKCLQAGMNLGARKSKKLGKLKGIHEEQPQQQQPPPPPPPPQSPEEGTTYIAPAKEPSVNTALVPQLSTISRALTPSPVMVLENIEPEIVYAGYDSSKPDTAENLLSTLNRLAGKQMIQVVKWAKVLPGFKNLPLEDQITLIQYSWMCLSSFALSWRSYKHTNSQFLYFAPDLVFNEEKMHQSAMYELCQGMHQISLQFVRLQLTFEEYTIMKVLLLLSTIPKDGLKSQAAFEEMRTNYIKELRKMVTKCPNNSGQSWQRFYQLTKLLDSMHDLVSDLLEFCFYTFRESHALKVEFPAMLVEIISDQLPKVESGNAKPLYFHRK

SEQ ID NO: 629 - protein, 494 aa, Homo sapiens
MFEIKKICCIGAGYVGGPTCSVIAHMCPEIRVTVVDVNESRINAWNSPTLPIYEPGLKEVVESCRGKNLFFSTNIDDAIKEADLVFISVNTPTKTYGMGKGRAADLKYIEACARRIVQNSNGYKIVTEKSTVPVRAAESIRRIFDANTKPNLNLQVLSNPEFLAEGTAIKDLKNPDRVLIGGDETPEGQRAVQALCAVYEHWVPREKILTTNTWSSELSKLAANAFLAQRISSINSISALCEATGADVEEVATAIGMDQRIGNKFLKASVGFGGSCFQKDVLNLVYLCEALNLPEVARYWQQVIDMNDYQRRRFASRIIDSLFNTVTDKKIAILGFAFKKDTGDTRESSSIYISKYLMDEGAHLHIYDPKVPREQIVVDLSHPGVSEDDQVSRLVTISKDPYEACDGAHAVVICTEWDMFKELDYERIHKKMLKPAFIFDGRRVLDGLHNELQTIGFQIETIGKKVSSKRIPYAPSGEIPKFSLQDPPNKKPKV

SEQ ID NO: 630 - protein, 291 aa, Homo sapiens
MARACLIQRLPIKRDCTPVFVRGLSSPSAAMALLSEGLDEVPAACLSPCGPPNPTELFSESRRLALEELVAGGPEAFAAFLRRERLARFLNPDEVHAILRAAERPGEEGAAAAAAAEDSFGSSHDCSSGTYFPEQSDLEPPLLELGWPAFYQGAYRGATRVETHFQPRGAGEGGPYGCKDALRQQLRSAREVIAVVMDVFTDIDIFRDLQEICRKQGVAVYILLDQALLSQFLDMCMDLKVHPEQEKLMTVRTITGNIYYARSGTKIIGKVHEKFTLIDGIRVATGSYSFT

SEQ ID NO: 631 - protein, 333 aa, Homo sapiens
MAMIELGFGRQNFHPLKRKSSLLLKLIAVVFAVLLFCEFLIYYLAIFQCNWPEVKTTASDGEQTTREPVLKAMFLADTHLLGEFLGHWLDKLRREWQMERAFQTALWLLQPEVVFILGDIFDEGKWSTPEAWADDVERFQKMFRHPSHVQLKVVAGNHDIGFHYEMNTYKVERFEKVFSSERLFSWKGINFVMVNSVALNGDGCGICSETEAELIEVSHRLNCSRELLWWLQPRLVLSGHTHSACEVHHGGRVPELSVPSFSWRNRNNPSFIMGSITPTDYTLSKCYLPREDVVLIIYCGVVGFLVVLTLTHFGLLASPFLSGLNLLGKRKTR

SEQ ID NO: 632 - protein, 233 aa, Homo sapiens
MNRLPDDYDPYAVEEPSDEEPALSSSEDEVDVLLHGTPDQKRKLIRECLTGESESSSEDEFEKEMEAELNSTMKTMEDKLSSLGTGSSSGNGKVATAPTRYYDDIYFDSDSEDEDRAVQVTKKKKKKQHKIPTNDELLYDPEKDNRDQAWVDAQRRGYHGLGPQRSRQQQPVPNSDAGLELSCLHDHTLALIAKGMNHTKTQYRAMFVMNCSINKEEVLRYKASENKEEKAGP

SEQ ID NO: 633 - protein, 2443 aa, Homo sapiens
MAAEEGVASAASAGGSWGTAAMGRVLPMLLVPVPAEAMGQLGSRAQLRTQPEALGSLTAAGSLQVLSLTPGSRGGGRCCLEGPFWHFLWEDSRNSSTPTEKPKLLALGENYELLIYEFNLKDGRCDATILYSCSREALQKLIDDQDISISLLSLRILSFHNNTSLLFINKCVILHIIFPERDAAIRVLNCFTLPLPAQAVDMIIDTQLCRGILFVLSSLGWIYIFDVVDGTYVAHVDLALHKEDMCNEQQQEPAKISSFTSLKVSQDLDVAVIVSSSNSAVALNLNLYFRQHPGHLLCERILEDLPIQGPKGVDEDDPVNSAYNMKLAKFSFQIDRSWKAQLSSLNETIKNSKLEVSCCAPWFQDILHLESPESGNHSTSVQSWAFIPQDIMHGQYNVLQKDHAKTSDPGRSWKIMHISEQEEPIELKCVSVTGFTALFTWEVERMGYTITLWDLETQGMQCFSLGTKCIPVDSSGDQQLCFVLTENGLSLILFGLTQEEFLNRLMIHGSASTVDTLCHLNGWGRCSIPIHALEAGIENRQLDTVNFFLKSKENLFNPSSKSSVSDQFDHLSSHLYLRNVEELIPALDLLCSAIRESYSEPQSKHFSEQLLNLTLSFLNNQIKELFIHTEELDEHLQKGVNILTSYINELRTFMIKFPWKLTDAIDEYDVHENVPKVKESNIWKKLSFEEVIASAILNNKIPEAQTFFRIDSHSAQKLEELIGIGLNLVFDNLKKNNIKEASELLKNMGFDVKGQLLKICFYTTNKNIRDFLVEILKEKNYFSEKEKRTIDFVHQVEKLYLGHFQENMQIQSFPRYWIKEQDFFKHKSVLDSFLKYDCKDEFNKQDHRIVLNWALWWDQLTQESILLPRISPEEYKSYSPEALWRYLTARHDWLNIILWIGEFQTQHSYASLQQNKWPLLTVDVINQNTSCNNYMRNEILDKLARNGVFLASELEDFECFLLRLSRIGGVIQDTLPVQNYKTKEGWDFHSQFILYCLEHSLQHLLYVYLDCYKLSPENCPFLEKKELHEAHPWFEFLVQCRQVASNLTDPKLIFQASLANAQILIPTNQASVSSMLLEGHTLLALATTMYSPGGVSQVVQNEENENCLKKVDPQLLKMALTPYPKLKTALFPQCTPPSVLPSDITIYHLIQSLSPFDPSRLFGWQSANTLAIGDAWSHLPHFSSPDLVNKYAIVERLNFAYYLHNGRPSFAFGTFLVQELIKSKTPKQLIQQVGNEAYVIGLSSFHIPSIGAACVCFLELLGLDSLKLRVDMKVANIILSYKCRNEDAQYSFIRESVAEKLSKLADGEKTTTEELLVLLEEGTWNSIQQQEIKRLSSESSSQWALVVQFCRLHNMKLSISYLRECAKANDWLQFIIHSQLHNYHPAEVKSLIQYFSPVIQDHLRLAFENLPSVPTSKMDSDQVCNKCPQELQGSKQEMTDLFEILLQCSEEPDSWHWLLVEAVKQQAPILSVLASCLQGASAISCLCVWIITSVEDNVATEAMGHIQDSTEDHTWNLEDLSVIWRTLLTRQKSKTLIRGFQLFFKDSPLLLVMEMYELCMFFRNYKEAEAKLLEFQKSLETLNTAATKVHPVIPAMWLEDQVCFLLKLMLQQCKTQYELGKLLQLFVEREHLFSDGPDVKKLCILCQILKDTSIAINHTIITSYSIENLQHECRSILERLQTDGQFALARRVAELAELPVDNLVIKEITQEMQTLKHIEQWSLKQARIDFWKKCHENFKKNSISSKAASSFFSTQAHVACEHPTGWSSMEERHLLLTLAGHWLAQEDVVPLDKLEELEKQIWLCRITQHTLGRNQEETEPRFSRQISTSGELSFDSLASEFSFSKLAALNTSKYLELNSLPSKETCENRLDWKEQESLNFLIGRLLDDGCVHEASRVCRYFHFYNPDVALVLHCRALASGEASMEDLHPEIHALLQSAELLEEEAPDIPLRRVHSTSSLDSQKFVTVPSSNEVVTNLEVLTSKCLHGKNYCRQVLCLYDLAKELGCSYTDVAAQDGEAMLRKILASQQPDRCKRAQAFISTQGLKPDTVAELVAEEVTRELLTSSQGTGHKQMFNPTEESQTFLQLTTLCQDRTLVGMKLLDKISSVPHGELSCTTELLILAHHCFTLTCHMEGIIRVLQAAHMLTDNHLAPSEEYGLVVRLLTGIGRYNEMTYIFDLLHKKHYFEVLMRKKLDPSGTLKTALLDYIKRCRPGDSEKHNMIALCFSMCREIGENHEAAARIQLKLIESQPWEDSLKDGHQLKQLLLKALTLMLDAAESYAKDSCVRQAQHCQRLTKLITLQIHFLNTGQNTMLINLGRHKLMDCILALPRFYQASIVAEAYDFVPDWAEILYQQVILKGDFNYLEEFKQQRLLKSSIFEEISKKYKQHQPTDMVMENLKKLLTYCEDVYLYYKLAYEHKFYEIVNVLLKDPQTGCCLKDMLAG

SEQ ID NO: 634 - protein, 411 aa, Homo sapiens
MNCCIGLGEKARGSHRASYPSLSALFTEASILGFGSFAVKAQWTEDCRKSTYPPSGPTYRGAVPWYTINLDLPPYKRWHELMLDKAPMLKVIVNSLKNMINTFVPSGKVMQVVDEKLPGLLGNFPGPFEEEMKGIAAVTDIPLGEIISFNIFYELFTICTSIVAEDKKGHLIHGRNMDFGVFLGWNINNDTWVITEQLKPLTVNLDFQRNNKTVFKASSFAGYVGMLTGFKPGLFSLTLNERFSINGGYLGILEWILGKKDAMWIGFLTRTVLENSTSYEEAKNLLTKTKILAPAYFILGGNQSGEGCVITRDRKESLDVYELDAKQGRWYVVQTNYDRWKHPFFLDDRRTPAKMCLNRTSQENISFETMYDVLSTKPVLNKLTVYTTLIDVTKGQFETYLRDCPDPCIGW

SEQ ID NO: 635 - protein, 2303 aa, Homo sapiens
MTSEEMTASVLIPVTQRKVVSAQSAADESSEKVSDINISKAHTVRRSGETSHTISQLNKLKEEPSGSNLPKILSIAREKIVSDENSNEKCWEKIMPDSAKNLNINCNNILRNHQHGLPQRQFYEMYNSVAEEDLCLETGIPSPLERKVFPGIQLELDRPSMGISPLGNQSVIIETGRAHPDSRRAVFHFHYEVDRRMSDTFCTLSENLILDDCGNCVPLPGGEEKQKKNYVAYTCKLMELAKNCDNKNEQLQCDHCDTLNDKYFCFEGSCEKVDMVYSGDSFCRKDFTDSQAAKTFLSHFEDFPDNCDDVEEDAFKSKKERSTLLVRRFCKNDREVKKSVYTGTRAIVRTLPSGHIGLTAWSYIDQKRNGPLLPCGRVMEPPSTVEIRQDGSQRLSEAQWYPIYNAVRREETENTVGSLLHFLTKLPASETAHGRISVGPCLKQCVRDTVCEYRATLQRTSISQYITGSLLEATTSLGARSGLLSTFGGSTGRMMLKERQPGPSVANSNALPSSSAGISKELIDLQPLIQFPEEVASILMEQEQTIYRRVLPVDYLCFLTRDLGTPECQSSLPCLKASISASILTTQNGEHNALEDLVMRFNEVSSWVTWLILTAGSMEEKREVFSYLVHVAKCCWNMGNYNAVMEFLAGLRSRKVLKMWQFMDQSDIETMRSLKDAMAQHESSCEYRKVVTRALHIPGCKVVPFCGVFLKELCEVLDGASGLMKLCPRYNSQEETLEFVADYSGQDNFLQRVGQNGLKNSEKESTVNSIFQVIRSCNRSLETDEEDSPSEGNSSRKSSLKDKSRWQFIIGDLLDSDNDIFEQSKEYDSHGSEDSQKAFDHGTELIPWYVLSIQADVHQFLLQGATVIHYDQDTHLSARCFLQLQPDNSTLTWVKPTTASPASSKAKLGVLNNTAEPGKFPLLGNAGLSSLTEGVLDLFAVKAVYMGHPGIDIHTVCVQNKLGSMFLSETGVTLLYGLQTTDNRLLHFVAPKHTAKMLFSGLLELTRAVRKMRKFPDQRQQWLRKQYVSLYQEDGRYEGPTLAHAVELFGGRRWSARNPSPGTSAKNAEKPNMQRNNTLGISTTKKKKKILMRGESGEVTDDEMATRKAKMHKECRSRSGSDPQDINEQEESEVNAIANPPNPLPSRRAHSLTTAGSPNLAAGTSSPIRPVSSPVLSSSNKSPSSAWSSSSWHGRIKGGMKGFQSFMVSDSNMSFVEFVELFKSFSVRSRKDLKDLFDVYAVPCNRSGSESAPLYTNLTIDENTSDLQPDLDLLTRNVSDLGLFIKSKQQLSDNQRQISDAIAAASIVTNGTGIESTSLGIFGVGILQLNDFLVNCQGEHCTYDEILSIIQKFEPSISMCHQGLMSFEGFARFLMDKENFASKNDESQENIKELQLPLSYYYIESSHNTYLTGHQLKGESSVELYSQVLLQGCRSVELDCWDGDDGMPIIYHGHTPTTKIPFKEVVEAIDRSAFINSDLPIIISIENHCSLPQQRKMAEIFKTVFGEKLVTKFLFETDFSDDPMLPSPDQLRKKVLLKNKKLKAHQTPVDILKQKAHQLASMQVQAYNGGNANPRPANNEEEEDEEDEYDYDYESLSDDNILEDRPENKSCNDKLQFEYNEEIPKRIKKADNSACNKGKVYDMELGEEFYLDQNKKESRQIAPELSDLVIYRQAVKFPGLSTLNASGSSRGKERKSRKSIFGNNPGRMSPGETASFNKTSGKSSCEGIRQTWEESSSPLNPTTSLSAIIRTPKCYHISSLNENAAKRLCRRYSQKLIQHTACQLLRTYPAATRIDSSNPNPLMFWLHGIQLVALNYQTDDLPLHLNAAMFEANGGCGYVLKPPVLWDKNCPMYQKFSPLERDLDSMDPAVYSLTIVSGQNVCPSNSMGSPCIEVDVLGMPLDSCHFRTKPIHRNTLNPMWNEQFLFRVHFEDLVFLRFAVVENNSSAVTAQRIIPLKALKRGYRHLQLRNLHNEVLEISSLFINSRRMEENSSGNTMSASSMFNTEERKCLQTHRVTVHGVPGPEPFTVFTINGGTKAKQLLQQILTNEQDIKPVTTDYFLMEEKYFISKEKNECRKQPFQRAIGPEEEIMQILSSWFPEEGYMGRIVLKTQQENLEEKNIVQDDKEVILSSEEESFFVQVHDVSPEQPRTVIKAPRVSTAQDVIQQTLCKAKYSYSILSNPNPSDYVLLEEVVKDTTNKKTTTPKSSQRVLLDQECVFQAQSKWKGAGKFILKLKEQVQASREDKKKGISFASELKKLTKSTKQPRGLTSPSQLLTSESIQTKEEKPVGGLSPVTQWITDSD

SEQ ID NO: 636 - protein, 1141 aa, Homo sapiens
MAAAVGVRGRYELPPCSGPGWLLSLSALLSVAARGAFATTHWVVTEDGKIQQQVDSPMNLKHPHDLVILMRQEATVNYLKELEKQLVAQKIHIEENEDRDTGLEQRHNKEDPDCIKAKVPLGDLDLYDGTYITLESKDISPEDYIDTESPVPPDPEQPDCTKILELPYSIHAFQHLRGVQERVNLSAPLLPKEDPIFTYLSKRLGRSIDDIGHLIHEGLQKNTSSWVLYNMASFYWRIKNEPYQVVECAMRALHFSSRHNKDIALVNLANVLHRAHFSADAAVVVHAALDDSDFFTSYYTLGNIYAMLGEYNHSVLCYDHALQARPGFEQAIKRKHAVLCQQKLEQKLEAQHRSLQRTLNELKEYQKQHDHYLRQQEILEKHKLIQEEQILRNIIHETQMAKEAQLGNHQICRLVNQQHSLHCQWDQPVRYHRGDIFENVDYVQFGEDSSTSSMMSVNFDVQSNQSDINDSVKSSPVAHSILWIWGRDSDAYRDKQHILWPKRADCTESYPRVPVGGELPTYFLPPENKGLRIHELSSDDYSTEEEAQTPDCSITDFRKSHTLSYLVKELEVRMDLKAKMPDDHARKILLSRINNYTIPEEEIGSFLFHAINKPNAPIWLILNEAGLYWRAVGNSTFAIACLQRALNLAPLQYQDVPLVNLANLLIHYGLHLDATKLLLQALAINSSEPLTFLSLGNAYLALKNISGALEAFRQALKLTTKCPECENSLKLIRCMQFYPFLYNITSSVCSGTVVEESNGSDEMENSDETKMSEEILALVDEFQQAWPLEGFGGALEMKGRRLDLQGIRVLKKGPQDGVARSSCYGDCRSEDDEATEWITFQVKRVKKPKGDHKKTPGKKVETGQIENGHRYQANLEITGPKVASPGPQGKKRDYQRLGWPSPDECLKLRWVELTAIVSTWLAVSSKNIDITEHIDFATPIQQPAMEPLCNGNLPTSMHTLDHLHGVSNRASLHYTGESQLTEVLQNLGKDQYPQQSLEQIGTRIAKVLEKNQTSWVLSSMAALYWRVKGQGKKAIDCLRQALHYAPHQMKDVPLISLANILHNAKLWNDAVIVATMAVEIAPHFAVNHFTLGNVYVAMEEFEKALVWYESTLKLQPEFVPAKNRIQTIQCHLMLKKGRRSP

SEQ ID NO: 637 - protein, 782 aa, Homo sapiens
MAPHRPAPALLCALSLALCALSLPVRAATASRGASQAGAPQGRVPEARPNSMVVEHPEFLKAGKEPGLQIWRVEKFDLVPVPTNLYGDFFTGDAYVILKTVQLRNGNLQYDLHYWLGNECSQDESGAAAIFTVQLDDYLNGRAVQHREVQGFESATFLGYFKSGLKYKKGGVASGFKHVVPNEVVVQRLFQVKGRRVVRATEVPVSWESFNNGDCFILDLGNNIHQWCGSNSNRYERLKATQVSKGIRDNERSGRARVHVSEEGTEPEAMLQVLGPKPALPAGTEDTAKEDAANRKLAKLYKVSNGAGTMSVSLVADENPFAQGALKSEDCFILDHGKDGKIFVWKGKQANTEERKAALKTASDFITKMDYPKQTQVSVLPEGGETPLFKQFFKNWRDPDQTDGLGLSYLSSHIANVERVPFDAATLHTSTAMAAQHGMDDDGTGQKQIWRIEGSNKVPVDPATYGQFYGGDSYIILYNYRHGGRQGQIIYNWQGAQSTQDEVAASAILTAQLDEELGGTPVQSRVVQGKEPAHLMSLFGGKPMIIYKGGTSREGGQTAPASTRLFQVRANSAGATRAVEVLPKAGALNSNDAFVLKTPSAAYLWVGTGASEAEKTGAQELLRVLRAQPVQVAEGSEPDGFWEALGGKAAYRTSPRLKDKKMDAHPPRLFACSNKIGRFVIEEVPGELMQEDLATDDVMLLDTWDQVFVWVGKDSQEEEKTEALTSAKRYIETDPANRDRRTPITVVKQGFEPPSFVGWFLGWDDDYWSVDPLDRAMAELAA

SEQ ID NO: 638 - protein, 510 aa, Homo sapiens
MAGSRQRGLRARVRPLFCALLLSLGRFVRGDGVGGDPAVALPHRRFEYKYSFKGPHLVQSDGTVPFWAHAGNAIPSSDQIRVAPSLKSQRGSVWTKTKAAFENWEVEVTFRVTGRGRIGADGLAIWYAENQGLEGPVFGSADLWNGVGIFFDSFDNDGKKNNPAIVIIGNNGQIHYDHQNDGASQALASCQRDFRNKPYPVRAKITYYQNTLTVMINNGFTPDKNDYEFCAKVENMIIPAQGHFGISAATGGLADDHDVLSFLTFQLTEPGKEPPTPDKEISEKEKEKYQEEFEHFQQELDKKKEEFQKGHPDLQGQPAEEIFESVGDRELRQVFEGQNRIHLEIKQLNRQLDMILDEQRRYVSSLTEEISKRGAGMPGQHGQITQQELDTVVKTQHEILRQVNEMKNSMSETVRLVSGMQHPGSAGGVYETTQHFIDIKEHLHIVKRDIDNLVQRNMPSNEKPKCPELPPFPSCLSTVHFIIFVVVQTVLFIGYIMYRSQQEAAAKKFF

SEQ ID NO: 639 - protein, 157 aa, Homo sapiens
MRAVPLPAPLLPLLLLALLAAPTARASRAESVSAPRPEPERESRPPPGPGPGNTTRFGSGAAGGSGSSNSSGDALVTRISILLRDLPTLKAAVIVAFAFTTLLIACLLLRVFRSGKRLKKTRKYDIITTPAERVEMAPLNEEDDEDEDSTVFDIKYR

SEQ ID NO: 640 - protein, 239 aa, Homo sapiens
MAHAGRTGYDNREIVMKYIHYKLSQRGYEWDAGDVGAAPPGAAPAPGIFSSQPGHTPHPAASRDPVARTSPLQTPAAPGAAAGPALSPVPPVVHLTLRQAGDDFSRRYRRDFAEMSSQLHLTPFTARGRFATVVEELFRDGVNWGRIVAFFEFGGVMCVESVNREMSPLVDNIALWMTEYLNRHLHTWIQDNGGWDAFVELYGPSMRPLFDFSWLSLKTLLSLALVGACITLGAYLGHK

SEQ ID NO: 641 - protein, 620 aa, Homo sapiens
MPSERCLSIQEMLTGQRLCHSESHNDSVLAALNQQRSDGILCDITLIAEEQKFHAHKAVLAACSDYFRAMFSLCMVESGADEVNLHGVTSLGLKQALEFAYTGQILLEPGVIQDVLAAGSHLQLLELLNLCSHYLIQELNSFNYLDLYRLADLFNLTLLEKAVIDFLVKHLSELLKSRPEEVLTLPYCLLQEVLKSDRLTSLSEEQIWQLAVRWLEHNCHYQYMDELLQYIRFGLMDVDTLHTVALSHPLVQASETATALVNEALEYHQSIYAQPVWQTRRTKPRFQSDTLYIIGGKKREVCKVKELRYFNPVDQENALIAAIANWSELASMPVGRSHHCVAVMGDFLFVAGGEVEHASGRTCAVRTACRYDPRSNSWAEIAPMKNCREHFVLGAMEEYLYAVGGRNELRQVLPTVERYCPKKNKWTFVQSFDRSLSCHAGYVADGLLWISGGVTNTAQYQNRLMVYEPNQNKWISRSPMLQRRVYHSMAAVQRKLYVLGGNDLDYNNDRILVRHIDSYNIDTDQWTRCNFNLLTGQNESGVAVHNGRIYLVGGYSIWTNEPLACIQVLDVSREGKEEVFYGPTLPFASNGIAACFLPAPYFTCPNLQTLQVPHHRIGTI

SEQ ID NO: 642 - protein, 269 aa, Homo sapiens
MKTPVELAVSGMQTLGLQHRCRGGYRVKARTSYVDETLFGSPAGTRPTPPDFDPPWVEKANRTRGVGKEASKALGAKGSCETTPSRGSTPTLTPRKKNKYRPISHTPSYCDESLFGSRSEGASFGAPRMAKGDAAKLRALLWTPPPTPRGSHSPRPREAPLRAIHPAGPSKTEPGPAADSQKLSMGGLHSSRPLKRGLSHSLTHLNVPSTGHPATSAPHTNGPQDLRPSTSGVTFRSPLVTSRARSVSISVPSTPRRGGATQKPKPPWK

SEQ ID NO: 643 - protein, 354 aa, Homo sapiens
MSRLLHAEEWAEVKELGDHHRQPQPHHLPQPPPPPQPPATLQAREHPVYPPELSLLDSTDPRAWLAPTLQGICTARAAQYLLHSPELGASEAAAPRDEVDGRGELVRRSSGGASSSKSPGPVKVREQLCKLKGGVVVDELGCSRQRAPSSKQVNGVQKQRRLAANARERRRMHGLNHAFDQLRNVIPSFNNDKKLSKYETLQMAQIYINALSELLQTPSGGEQPPPPPASCKSDHHHLRTAASYEGGAGNATAAGAQQASGGSQRPTPPGSCRTRFSAPASAGGYSVQLDALHFSTFEDSALTAMMAQKNLSPSLPGSILQPVQEENSKTSPRSHRSDGEFSPHSHYSDSDEAS

SEQ ID NO: 644 - protein, 293 aa, Homo sapiens
MNNLSFSELCCLFCCPPCPGKIASKLAFLPPDPTYTLMCDESGSRWTLHLSERADWQYSSREKDAIECFMTRTSKGNRIACMFVRCSPNAKYTLLFSHGNAVDLGQMSSFYIGLGSRINCNIFSYDYSGYGASSGKPTEKNLYADIEAAWLALRTRYGIRPENVIIYGQSIGTVPSVDLAARYESAAVILHSPLTSGMRVAFPDTKKTYCFDAFPNIDKISKITSPVLIIHGTEDEVIDFSHGLALFERCQRPVEPLWVEGAGHNDVELYGQYLERLKQFVSQELVQKHKEGK

SEQ ID NO: 645 - protein, 605 aa, Homo sapiens
MGYSVVAGAAGRLLFGYDSFGNMCGKKNSPVEGAPLSGQDMTLKKHVFFMNSCNLEVKGTQLNRMALCVSNCPEEQLDSLEEVQFFANTSGSFLCVYSLNSFNYTHSPKADSLCPRLPVPPSKSFPLFNRCVPQTPECYSLFASVLINDVDTLHRILSGIMSGRDTILGLCILALALSLAMMFTFRFITTLLVHIFISLVILGLLFVCGVLWWLYYDYTNDLSIELDTERENMKCVLGFAIVSTGITAVLLVLIFVLRKRIKLTVELFQITNKAISSAPFLLFQPLWTFAILIFFWVLWVAVLLSLGTAGAAQVMEGGQVEYKPLSGIRYMWSYHLIGLIWTSEFILACQQMTIAGAVVTCYFNRSKNDPPDHPILSSLSILFFYHQGTIVKGSFLISVVRIPRIIVMYMQNALKEQQHGALSRYLFRCCYCCFWCLDKYLLHLNQNAYTTTAINGTDFCTSAKDAFKILSKNSSHFTSINCFGDFIIFLGKVLVVCFTVFGGLMAFNYNRAFQVWAVPLLLVAFFAYLVAHSFLSVFETVLDALFLCFAVDLETNDGSSEKPYFMDQEFLSFVKRSNKLNNARAQQDKHSLRNEEGTELQAIVR

SEQ ID NO: 646 - protein, 319 aa, Homo sapiens
TEVPKPSAKDVEILEQESEVLEPSVEQDAESPGLSTAAGFESPEPGRDDPGPSEAQRAEVQGQHPPPGPKTSSSRSGSEAPHLRFPPCPEAPQRPPEERFMETPIEREIRRSCEREESLRRSRGLSPGRAGRELVELRVRPVLNLPGPGPALPRALERARAGAQMQRDIEREAHRQAALARPAVPEPRARSPPQPLGELKRFFEAAAGSGSSAGAGDGAGPQRLPEPGGRPRSAVQGGCRVLGSAPPPFTPSLLEQEVRAVREREQELQRQRRSVYGTAEFKEPTPSLTASRGDGKLVVIWPPRRKVSENGLEQEERKP

SEQ ID NO: 647 - protein, 362 aa, Homo sapiens
MELGSCLEGGREAAEEEGEPEVKKRRLLCVEFASVASCDAAVAQCFLAENDWEMERALNSYFEPPVEESALERRPETISEPKTYVDLTNEETTDSTTSKISPSEDTQQENGSMFSLITWNIDGLDLNNLSERARGVCSYLALYSPDVIFLQEVIPPYYSYLKKRSSNYEIITGHEEGYFTAIMLKKSRVKLKSQEIIPFPSTKMMRNLLCVHVNVSGNELCLMTSHLESTRGHAAERMNQLKMVLKKMQEAPESATVIFAGDTNLRDREVTRCGGLPNNIVDVWEFLGKPKHCQYTWDTQMNSNLGITAACKLRFDRIFFRAAAEEGHIIPRSLDLLGLEKLDCGRFPSDHWGLLCNLDIIL

SEQ ID NO: 648 - protein, 357 aa, Homo sapiens
EPGVNPEEQLIIIQSRLDQSMEENQDLKKELLKCKQEARNLQGIKDALQQRLTQQDTSVLQLKQELLRANMDKDELHNQNVDLQRKLDERNRLLGEYKKELGQKDRLLQQHQAKLEEALRKLSDVSYHQVDLERELEHKDVLLAHCMKREADEATNYNSHNSQSNGFLLPTAGKGATSVSNRGTSDLQLVRDALRSLRNSFSGHDPQHHTIDSLEQGISSLMERLHVMETQKKQERKVRVKSPRTQVGSEYRESWPPNSKLPHSQSSPTVSSTCTKVLYFTDRSLTPFMVNIPKRLEEVTLKDFKAAIDREGNHRYHFKALDPEFGTVKEEIFHDDDAIPGWEGKIVAWVEEDHGEN

SEQ ID NO: 649 - protein, 1118 aa, Homo sapiens
MPAVASVPKELYLSSSLKDLNKKTEVKPEKISTKSYVHSALKIFKTAEECRLDRDEERAYVLYMKYVTVYNLIKKRPDFKQQQDYFHSILGPGNIKKAVEEAERLSESLKLRYEEAEVRKKLEEKDRQEEAQRLQQKRQETGREDGGTLAKGSLENVLDSKDKTQKSNGEKNEKCETKEKGAITAKELYTMMTDKNISLIIMDARRMQDYQDSCILHSLSVPEEAISPGVTASWIEAHLPDDSKDTWKKRGNVEYVVLLDWFSSAKDLQIGTTLRSLKDALFKWESKTVLRNEPLVLEGGYENWLLCYPQYTTNAKVTPPPRRQNEEVSISLDFTYPSLEESIPSKPAAQTPPASIEVDENIELISGQNERMGPLNISTPVEPVAASKSDVSPIIQPVPSIKNVPQIDRTKKPAVKLPEEHRIKSESTNHEQQSPQSGKVIPDRSTKPVVFSPTLMLTDEEKARIHAETALLMEKNKQEKELRERQQEEQKEKLRKEEQEQKAKKKQEAEENEITEKQQKAKEEMGKKESEQAKKEDKETSAKRGKEITGVKRQSKSEHETSDAKKSVEDRGKRCPTPEIQKKSTGDVPHTSVTGDSGSGKPFKIKGQPESGILRTGTFREDTDDTERNKAQREPLTRARSEEMGRIVPGLPSGWAKFLDPITGTFRYYHSPTNTVHMYPPEMAPSSAPPSTPPTHKAKPQIPAERDREPSKLKRSHSSPDITQAIQEEEKRKPTVTPTVNRENKPTCYPKAEISRLSASQIRNLNPVFGGSGPALTGLRNLGNTCYMNSILQCLCNAPHLADYFNRNCYQDDINRSNLLGHKGEVAEEFGIIMKALWTGQYRYISPKDFKITIGKINDQFAGYSQQDSQELLLFLMDGLHEDLNKADNRKRYKEENNDHLDDFKAAEHAWQKHKQLNESIIVALFQGQFKSTVQCLTCHKKSRAFEAFMYLSLPLASTSKCTLQDCLRLFSKEEKLTDNNRFYCSHCRARRDSLKKIEIWKLPPVLLVHLKRFSYDGRWKQKLQTSVDFPLENLDLSQYVIGPKNNLKKYNLFSVSNHYGGLDGGHYTAYCKNAARQRWFKFDDHEVSDISVSSVKSSAAYILFYTSLGPRVTDVAT

SEQ ID NO: 650 - protein, 1897 aa, Homo sapiens
MVPLVPALVMLGLVAGAHGDSKPVFIKVPEDQTGLSGGVASFVCQATGEPKPRITWMKKGKKVSSQRFEVIEFDDGAGSVLRIQPLRVQRDEAIYECTATNSLGEINTSAKLSVLEEEQLPPGFPSIDMGPQLKVVEKARTATMLCAAGGNPDPEISWFKDFLPVDPATSNGRIKQLRSGALQIESSEESDQGKYECVATNSAGTRYSAPANLYVRVRRVAPRFSIPPSSQEVMPGGSVNLTCVAVGAPMPYVKWMMGAEELTKEDEMPVGRNVLELSNVVRSANYTCVAISSLGMIEATAQVTVKALPKPPIDLVVTETTATSVTLTWDSGNSEPVTYYGIQYRAAGTEGPFQEVDGVATTRYSIGGLSPFSEYAFRVLAVNSIGRGPPSEAVRARTGEQAPSSPPRRVQARMLSASTMLVQWEPPEEPNGLVRGYRVYYTPDSRRPPNAWHKHNTDAGLLTTVGSLLPGITYSLRVLAFTAVGDGPPSPTIQVKTQQGVPAQPADFQAEVESDTRIQLSWLLPPQERIIMYELVYWAAEDEDQQHKVTFDPTSSYTLEDLKPDTLYRFQLAARSDMGVGVFTPTIEARTAQSTPSAPPQKVMCVSMGSTTVRVSWVPPPADSRNGVITQYSVAHEAVDGEDRGRHVVDGISREHSSWDLVGLEKWTEYRVWVRAHTDVGPGPESSPVLVRTDEDVPSGPPRKVEVEPLNSTAVHVYWKLPVPSKQHGQIRGYQVTYVRLENGEPRGLPIIQDVMLAEAQWRPEESEDYETTISGLTPETTYSVTVAAYTTKGDGARSKPKIVTTTGAVPGRPTMMISTTAMNTALLQWHPPKELPGELLGYRLQYCRADEARPNTIDFGKDDQHFTVTGLHKGTTYIFRLAAKNRAGLGEEFEKEIRTPEDLPSGFPQNLHVTGLTTSTTELAWDPPVLAERNGRIISYTVVFRDINSQQELQNITTDTRFTLTGLKPDTTYDIKVRAWTSKGSGPLSPSIQSRTMPVEQVFAKNFRVAAAMKTSVLLSWEVPDSYKSAVPFKILYNGQSVEVDGHSMRKLIADLQPNTEYSFVLMNRGSSAGGLQHLVSIRTAPDLLPHKPLPASAYIEDGRFDLSMPHVQDPSLVRWFYIVVVPIDRVGGSMLTPRWSTPEELELDELLEAIEQGGEEQRRRRRQAERLKPYVAAQLDVLPETFTLGDKKNYRGFYNRPLSPDLSYQCFVLASLKEPMDQKRYASSPYSDEIVVQVTPAQQQEEPEMLWVTGPVLAVILIILIVIAILLFKRKRTHSPSSKDEQSIGLKDSLLAHSSDPVEMRRLNYQTPGMRDHPPIPITDLADNIERLKANDGLKFSQEYESIDPGQQFTWENSNLEVNKPKNRYANVIAYDHSRVILTSIDGVPGSDYINANYIDGYRKQNAYIATQGPLPETMGDFWRMVWEQRTATVVMMTRLEEKSRVKCDQYWPARGTETCGLIQVTLLDTVELATYTVRTFALHKSGSSEKRELRQFQFMAWPDHGVPEYPTPILAFLRRVKACNPLDAGPMVVHCSAGVGRTGCFIVIDAMLERMKHEKTVDIYGHVTCMRSQRNYMVQTEDQYVFIHEALLEAATCGHTEVPARNLYAHIQKLGQVPPGESVTAMELEFKLLASSKAHTSRFISANLPCNKFKNRLVNIMPYELTRVCLQPIRGVEGSDYINASFLDGYRQQKAYIATQGPLAESTEDFWRMLWEHNSTIIVMLTKLREMGREKCHQYWPAERSARYQYFVVDPMAEYNMPQYILREFKVTDARDGQSRTIRQFQFTDWPEQGVPKTGEGFIDFIGQVHKTKEQFGQDGPITVHCSAGVGRTGVFITLSIVLERMRYEGVVDMFQTVKTLRTQRPAMVQTEDQYQLCYRAALEYLGSFDHYAT

SEQ ID NO: 651 - protein, 1256 aa, Homo sapiens
MLFKLLQRQTYTCLSHRYGLYVCFLGVVVTIVSAFQFGEVVLEWSRDQYHVLFDSYRDNIAGKSFQNRLCLPMPIDVVYTWVNGTDLELLKELQQVREQMEEEQKAMREILGKNTTEPTKKSEKQLECLLTHCIKVPMLVLDPALPANITLKDLPSLYPSFHSASDIFNVAKPKNPSTNVSVVVFDSTKDVEDAHSGLLKGNSRQTVWRGYLTTDKEVPGLVLMQDLAFLSGFPPTFKETNQLKTKLPENLSSKVKLLQLYSEASVALLKLNNPKDFQELNKQTKKNMTIDGKELTISPAYLLWDLSAISQSKQDEDISASRFEDNEELRYSLRSIERHAPWVRNIFIVTNGQIPSWLNLDNPRVTIVTHQDVFRNLSHLPTFSSPAIESHIHRIEGLSQKFIYLNDDVMFGKDVWPDDFYSHSKGQKVYLTWPVPNCAEGCPGSWIKDGYCDKACNNSACDWDGGDCSGNSGGSRYIAGGGGTGSIGVGQPWQFGGGINSVSYCNQGCANSWLADKFCDQACNVLSCGFDAGDCGQDHFHELYKVILLPNQTHYIIPKGECLPYFSFAEVAKRGVEGAYSDNPIIRHASIANKWKTIHLIMHSGMNATTIHFNLTFQNTNDEEFKMQITVEVDTREGPKLNSTAQKGYENLVSPITLLPEAEILFEDIPKEKRFPKFKRHDVNSTRRAQEEVKIPLVNISLLPKDAQLSLNTLDLQLEHGDITLKGYNLSKSALLRSFLMNSQHAKIKNQAIITDETNDSLVAPQEKQVHKSILPNSLGVSERLQRLTFPAVSVKVNGHDQGQNPPLDLETTARFRVETHTQKTIGGNVTKEKPPSLIVPLESQMTKEKKITGKEKENSRMEENAENHIGVTEVLLGRKLQHYTDSYLGFLPWEKKKYFQDLLDEEESLKTQLAYFTDSKNTGRQLKDTFADSLRYVNKILNSKFGFTSRKVPAHMPHMIDRIVMQELQDMFPEEFDKTSFHKVRHSEDMQFAFSYFYYLMSAVQPLNISQVFDEVDTDQSGVLSDREIRTLATRIHELPLSLQDLTGLEHMLINCSKMLPADITQLNNIPPTQESYYDPNLPPVTKSLVTNCKPVTDKIHKAYKDKNKYRFEIMGEEEIAFKMIRTNVSHVVGQLDDIRKNPRKFVCLNDNIDHNHKDAQTVKAVLRDFYESMFPIPSQFELPREYRNRFLHMHELQEWRAYRDKLKFWTHCVLATLIMFTIFSFFAEQLIALKRKIFPRRRIHKEASPNRIRV

SEQ ID NO: 652 - protein, 422 aa, Homo sapiens
MPRSFLVKSKKAHSYHQPRSPGPDYSLRLENVPAPSRADSTSNAGGAKAEPRDRLSPESQLTEAPDRASASPDSCEGSVCERSSEFEDFWRPPSPSASPASEKSMCPSLDEAQPFPLPFKPYSWSGLAGSDLRHLVQSYRPCGALERGAGLGLFCEPAPEPGHPAALYGPKRAAGGAGAGAPGSCSAGAGATAGPGLGLYGDFGSAAAGLYERPTAAAGLLYPERGHGLHADKGAGVKVESELLCTRLLLGGGSYKCIKCSKVFSTPHGLEVHVRRSHSGTRPFACEMCGKTFGHAVSLEQHKAVHSQERSFDCKICGKSFKRSSTLSTHLLIHSDTRPYPCQYCGKRFHQKSDMKKHTFIHTGEKPHKCQVCGKAFSQSSNLITHSRKHTGFKPFGCDLCGKGFQRKVDLRRHRETQHGLK

SEQ ID NO: 653 - protein, 140 aa, Homo sapiens
MTSMTQSLREVIKAMTKARNFERVLGKITLVSAAPGKVICEMKVEEEHTNAIGTLHGGLTATLVDNISTMALLCTERGAPGVSVDMNITYMSPAKLGEDIVITAHVLKQGKTLAFTSVDLTNKATGKLIAQGRHTKHLGN

SEQ ID NO: 654 - protein, 818 aa, Homo sapiens
MESEQLFHRGYYRNSYNSITSASSDEELLDGAGVIMDFQTSEDDNLLDGDTAVGTHYTMTNGGSINSSTHLLDLLDEPIPGVGTYDDFHTIDWVREKCKDRERHRRINSKKKESAWEMTKSLYDAWSGWLVVTLTGLASGALAGLIDIAADWMTDLKEGICLSALWYNHEQCCWGSNETTFEERDKCPQWKTWAELIIGQAEGPGSYIMNYIMYIFWALSFAFLAVSLVKVFAPYACGSGIPEIKTILSGFIIRGYLGKWTLMIKTITLVLAVASGLSLGKEGPLVHVACCCGNIFSYLFPKYSTNEAKKREVLSAASAAGVSVAFGAPIGGVLFSLEEVSYYFPLKTLWRSFFAALVAAFVLRSINPFGNSRLVLFYVEYHTPWYLFELFPFILLGVFGGLWGAFFIRANIAWCRRRKSTKFGKYPVLEVIIVAAITAVIAFPNPYTRLNTSELIKELFTDCGPLESSSLCDYRNDMNASKIVDDIPDRPAGIGVYSAIWQLCLALIFKIIMTVFTFGIKVPSGLFIPSMAIGAIAGRIVGIAVEQLAYYHHDWFIFKEWCEVGADCITPGLYAMVGAAACLGGVTRMTVSLVVIVFELTGGLEYIVPLMAAVMTSKWVGDAFGREGIYEAHIRLNGYPFLDAKEEFTHTTLAADVMRPRRNDPPLAVLTQDNMTVDDIENMINETSYNGFPVIMSKESQRLVGFALRRDLTIAIESARKKQEGIVGSSRVCFAQHTPSLPAESPRPLKLRSILDMSPFTVTDHTPMEIVVDIFRKLGLRQCLVTHNGRLLGIITKKDILRHMAQTANQDPASIMFN

SEQ ID NO: 655 - protein, 409 aa, Homo sapiens; identical to SEQ ID NO: 550

SEQ ID NO: 656 - protein, 63 aa, Homo sapiens
MDPALAAQMSEAVAEKMLQYRRDTAGWKICREGVPRRRHCIWDTRGGVGLCEASCWRPTSEVG

SEQ ID NO: 657 - protein, 612 aa, Homo sapiens; identical to SEQ ID NO: 557

SEQ ID NO: 658 - protein, 1872 aa, Homo sapiens
GCSCTAPALSGPVARTIYYIAAELVRLVGSVDSMKPVLQSLYHRVLLYPPPQHRVEAIKIMKEILGSPQRLCDLAGPSSTESESRKRSISKRKSHLDLLKLIMDGMTEACIKGGIEACYAAVSCVCTLLGALDELSQGKGLSEGQVQLLLLRLEELKDGAEWSRDSMEINEADFRWQRRVLSSEHTPWESGNERSLDISISVTTDTGQTTLEGELGQTTPEDHSGNHKNSLKSPAIPEGKETLSKVLETEAVDQPDVVQRSHTVPYPDITNFLSVDCRTRSYGSRYSESNFSVDDQDLSRTEFDSCDQYSMAAEKDSGRSDVSDIGSDNCSLADEEQTPRDCLGHRSLRTAALSLKLLKNQEADQHSARLFIQSLEGLLPRLLSLSNVEEVDTALQNFASTFCSGMMHSPGFDGNSSLSFQMLMNADSLYTAAHCALLLNLKLSHGDYYRKRPTLAPGVMKDFMKQVQTSGVLMVFSQAWIEELYHQVLDRNMLGEAGYWGSPEDNSLPLITMLTDIDGLESSAIGGQLMASAATESPFAQSRRIDDSTVAGVAFARYILVGCWKNLIDTLSTPLTGRMAGSSKGLAFILGAEGIKEQNQKERDAICMSLDGLRKAARLSCALGVAANCASALAQMAAASCVQEEKEEREAQEPSDAITQVKLKVEQKLEQIGKVQGVWLHTAHVLCMEAILSVGLEMGSHNPDCWPHVFRVCEYVGTLEHNHFSDGASQPPLTISQPQKATGSAGLLGDPECEGSPPEHSPEQGRSLSTAPVVQPLSIQDLVREGSRGRASDFRGGSLMSGSSAAKVVLTLSTQADRLFEDATDKLNLMALGGFLYQLKKASQSQLFHSVTDTVDYSLAMPGEVKSTQDRKSALHLFRLGNAMLRIVRSKARPLLHVMRCWSLVAPHLVEAACHKERHVSQKAVSFIHDILTEVLTDWNEPPHFHFNEALFRPFERIMQLELCDEDVQDQVVTSIGELVEVCSTQIQSGWRPLFSALETVHGGNKSEMKEYLVGDYSMGKGQAPVFDVFEAFLNTDNIQVFANAATSYIMCLMKFVKGLGEVDCKEIGDCAPAPGAPSTDLCLPALDYLRRCSQLLAKIYKMPLKPIFLSGRLAGLPRRLQEQSASSEDGIESVLSDFDDDTGLIEVWIILLEQLTAAVSNCPRQHQPPTLDLLFELLRDVTKTPGPGFGIYAVVHLLLPVMSVWLRRSHKDHSYWDMASANFKHAIGLSCELVVEHIQSFLHSDIRYESMINTMLKDLFELLVACVAKPTETISRVGCSCIRYVLVTAGPVFTEEMWRLACCALQDAFSATLKPVKDLLGCFHSGTESFSGEGCQVRVAAPSSSPSAEAEYWRIRAMAQQVFMLDTQCSPKTPNNFDHAQSCQLIIELPPDEKPNGHTKKSVSFREIVVSLLSHQVLLQNLYDILLEEFVKGPSPGEEKTIQVPEAKLAGFLRYISMQNLAVIFDLLLDSYRTAREFDTSPGLKCLLKKVSGIGGAANLYRQSAMSFNIYFHALVCAVLTNQETITAEQVKKVLFEDDERSTDSSQQCSSEDEDIFEETAQVSPPRGKEKRQWRARMPLLSVQPVSNADWVWLVKRLHKLCMELCNNYIQMHLDLENCMEEPPIFKGDPFFILPSFQSESSTPSTGGFSGKETPSEDDRSQSREHMGESLSLKAGGGDLLLPPSPKVEKKDPSRKKEWWENAGNKIYTMAADKTISKLMTEYKKRKQQHNLSAFPKEVKVEKKGEPLGPRGQDSPLLQRPQHLMDQGQMRHSFSAGPELLRQDKRPRSGSTGSSLSVSVRDAEAQIQAWTNMVLTVLNQIQILPDQTFTALQPAVFPCISQLTCHVTDIRVRQAVREWLGRVGRVYDIIV

SEQ ID NO: 659 - protein, 259 aa, Homo sapiens
MEEFLQRAKSKLNRSKRLEKVHVVIGPKSCDLDSLISTFTYAYFLDKVSPPGVLCLPVLNIPRTEFNYFTETRFILEELNISESFHIFRDEINLHQLNDEGKLSITLVGSSVLASEDKTLESAVVKVINPVEQSDANVEFRESSSSLVLKEILQEAPELITEQLAHRLRGSILFKWMTMESEKISEKQEEILSILEEKFPNLPPREDIINVLQETQFSAQGLSIEQTMLKDLKELSDGEIKVAISTVSMNLEVRVGMLF

SEQ ID NO: 660 - protein, 496 aa, Homo sapiens
MFRSKRSGLVRRLWRSRVVPDREEGGSGGGGGGDEDGSLGSRAEPAPRAREGGGCGRSEVRPVAPRRPRDAVGQRGAQGAGRRRRAGGPPRPMSEPGAGAGSSLLDVAEPGGPGWLPESDCETVTCCLFSERDAAGAPRDASDPLAGAALEPAGGGRSREARSRLLLLEQELKTVTYSLLKRLKERSLDTLLEAVESRGGVPGGCVLVPRADLRLGGQPAPPQLLLGRLFRWPDLQHAVELKPLCGCHSFAAAADGPTVCCNPYHFSRLCGPESPPPPYSRLSPRDEYKPLDLSDSTLSYTETEATNSLITAPGEFSDASMSPDATKPSHWCSVAYWEHRTRVGRLYAVYDQAVSIFYDLPQGSGFCLGQLNLEQRSESVRRTRSKIGFGILLSKEPDGVWAYNRGEHPIFVNSPTLDAPGGRALVVRKVPPGYSIKVFDFERSGLQHAPEPDAADGPYDPNSVRISFAKGWGPCYSRQFITSCPCWLEILLNNPR

SEQ ID NO: 661 - protein, 323 aa, Homo sapiens
MAAPKGSLWVRTQLGLPPLLLLTMALAGGSGTASAEAFDSVLGDTASCHRACQLTYPLHTYPKEEELYACQRGCRLFSICQFVDDGIDLNRTKLECESACTEAYSQSDEQYACHLGCQNQLPFAELRQEQLMSLMPKMHLLFPLTLVRSFWSDMMDSAQSFITSSWTFYLQADDGKIVIFQSKPEIQYAPHLEQEPTNLRESSLSKMSYLQMRNSQAHRNFLEDGESDGFLRCLSLNSGWILTTTLVLSVMVLLWICCATVATAVEQYVPSEKLSIYGDLEFMNEQKLNRYPASSLVVVRSKTEDHEEAGPLPTKVNLAHSEI

SEQ ID NO: 662 - protein, 581 aa, Homo sapiens
MIHFRSSSVKSLSQEMRCTIRLLDDSEISCHIQRETKGQFLIDHICNYYSLLEKDYFGIRYVDPEKQRHWLEPNKSIFKQMKTHPPYTMCFRVKFYPHEPLKIKEELTRYLLYLQIKRDIFHGHLLCSFSDAAYLGACIVQAELGDYDPNEHPENYISEFEIFPKQSQKLERKIVEIHKNELRGQSPPVAEFNLLLKAHTLETYGVDPHPCKDSTGTTTFLGFTAAGFVVFQGNKRIHLIKWPDVCKLKFEGKTFYVIGTQKEKKAMLAFNTSTPAACKHLWKCGVENQAFYKYAKSSQIKTVSSSKIFFKGSRFRYSGKVAKEVVEASSKIQREPPEVHRANITQSRSSHSLNKQLIINMEPLQPLLPSPSEQEEELPLGEGVPLPKEENISAPLISSSPVKAAREYEDPPSEEEDKIKEEPLTISELVYNPSASLLPTPVDDDEIDMLFDCPSRLELEREDTDSFEDLEADENAFLIAEEEELKEARRALSWSYDILTGHIRVNPLVKSFSRLLVVGLGLLLFVFPLLLLLLESGIDLSFLCEIRQTPEFEQFHYEYYCPLKEWVAGKVHLILYMLGCS

SEQ ID NO: 663 - protein, 362 aa, Homo sapiens
AAKRLNAKEIVLKAQILAGGRGKGVFNSGLKGGVHLTKDPNVVGQLAKQMIGYNLATKQTPKEGVKVNKVMVAEALDISRETYLAILMDRSCNGPVLVGSPQGGVDIEEVAASNPELIFKEQIDIFEGIKDSQAQRMAENLGFVGPLKSQAADQITKLYNLFLKIDATQVEVNPFGETPEGQVVCFDAKINFDDNAEFRQKDIFAMDDKSENEPIENEAAKYDLKYIGLDGNIACFVNGAGLAMATCDIIFLNGGKPANFLDLGGGVKEAQVYQAFKLLTADPKVEAILVNIFGGIVNCAIIANGITKACRELELKVPLVVRLEGTNVQEAQKILNNSGLPITSAIDLEDAAKKAVASVAKK

SEQ ID NO: 664 - protein, 931 aa, Homo sapiens
MPPLKSPAAFHEQRRSLERARTEDYLKRKIRSRPERSELVRMHILEETSAEPSLQAKQLKLKRARLADDLNEKIAQRPGPMELVEKNILPVESSLKEAIIVGQVNYPKVADSSSFDEDSSDALSPEQPASHESQGSVPSPLEARVSEPLLSATSASPTQVVSQLPMGRDSREMLFLAEQPPLPPPPLLPPSLTNGTTIPTAKSTPTLIKQSQPKSASEKSQRSKKAKELKPKVKKLKYHQYIPPDQKQDRGAPPMDSSYAKILQQQQLFLQLQILNQQQQQHHNYQAILPAPPKSAGEALGSSGTPPVRSLSTTNSSSSSGAPGPCGLARQNSTSLTGKPGALPANLDDMKVAELKQELKLRSLPVSGTKTELIERLRAYQDQISPVPGAPKAPAATSILHKAGEVVVAFPAARLSTGPALVAAGLAPAEVVVATVASSGVVKFGSTGSTPPVSPTPSERSLLSTGDENSTPGDTFGEMVTSPLTQLTLQASPLQILVKEEGPRAGSCCLSPGGRAELEGRDKDQMLQEKDKQIEALTRMLRQKQQLVERLKLQLEQEKRAQQPAPAPAPLGTPVKQENSFSSCQLSQQPLGPAHPFNPSLAAPATNHIDPCAVAPGPPSVVVKQEALQPEPEPVPAPQLLLGPQGPSLIKGVAPPTLITDSTGTHLVLTVTNKNADSPGLSSGSPQQPSSQPGSPAPAPSAQMDLEHPLQPLFGTPTSLLKKEPPGYEEAMSQQPKQQENGSSSQQMDDLFDILIQSGEISADFKEPPSLPGKEKPSPKTVCGSPLAAQPSPSAELPQAAPPPPGSPSLPGRLEDFLESSTGLPLLTSGHDGPEPLSLIDDLHSQMLSSTAILDHPPSPMDTSELHFVPEPSSTMGLDLADGHLDSMDWLELSSGGPVLSLAPLSTTAPSLFSTDFLDGHDLQLHWDSCL

SEQ ID NO: 665 - protein, 1243 aa, Homo sapiens
MLASPATETTVLMSQTEADLALRPPPPLGTAGQPRLGPPPRRARRFSGKAEPRPRSSRLSRRSSVDLGLLSSWSLPASPAPDPPDPPDSAGPGPARSPPPSSKEPPEGTWTEGAPVKAAEDSARPELPDSAVGPGSREPLRVPEAVALERRREQEEKEDMETQAVATSPDGRYLKFDIEIGRGSFKTVYRGLDTDTTVEVAWCELQTRKLSRAERQRFSEEVEMLKGLQHPNIVRFYDSWKSVLRGQVCIVLVTELMTSGTLKTYLRRFREMKPRVLQRWSRQILRGLHFLHSRVPPILHRDLKCDNVFITGPTGSVKIGDLGLATLKRASFAKSVIGTPEFMAPEMYEEKYDEAVDVYAFGMCMLEMATSEYPYSECQNAAQIYRKVTSGRKPNSFHKVKIPEVKEIIEGCIRTDKNERFTIQDLLAHAFFREERGVHVELAEEDDGEKPGLKLWLRMEDARRGGRPRDNQAIEFLFQLGRDAAEEVAQEMVALGLVCEADYQPVARAVRERVAAIQRKREKLRKARELEALPPEPGPPPATVPMAPGPPSVFPPEPEEPEADQHQPFLFRHASYSSTTSDCETDGYLSSSGFLDASDPALQPPGGVPSSLAESHLCLPSAFALSIPRSGPGSDFSPGDSYASDAASGLSDVGEGMGQMRRPPGRNLRRRPRSRLRVTSVSDQNDRVVECQLQTHNSKMVTFRFDLDGDSPEEIAAAMVYNEFILPSERDGFLRRIREIIQRVETLLKRDTGPMEAAEDTLSPQEEPAPLPALPVPLPDPSNEELQSSTSLEHRSWTAFSTSSSSPGTPLSPGNPFSPGTPISPGPIFPITSPPCHPSPSPFSPISSQVSSNPSPHPTSSPLPFSSSTPEFPVPLSQCPWSSLPTTSPPTFSPTCSQVTLSSPFFPPCPSTSSFPSTTAAPLLSLASAFSLAVMTVAQSLLSPSPGLLSQSPPAPPSPLPSLPLPPPVAPGGQESPSPHTAEVESEASPPPARPLPGEARLAPISEEGKPQLVGRFQVTSSKEPAEPLPLQPTSPTLSGSPKPSTPQLTSESSDTEDSAGGGPETREALAESDRAAEGLGAGVEEEGDDGKEPQVGGSPQPLSHPSPVWMNYSYSSLCLSSEESESSGEDEEFWAELQSLRQKHLSEVETLQTLQKKEIEDLYSRLGKQPPPGIVAPAAMLSSRQRRLSKGSFPTSRRNSLQRSEPPGPGIMRRNSLSGSSTGSQEQRASKGVTFAGDVGRM

SEQ ID NO: 666 - protein, 432 aa, Homo sapiens
MEGLAVRLLRGSRLLRRNFLTCLSSWKIPPHVSKSSQSEALLNITNNGIHFAPLQTFTDEEMMIKSSVKKFAQEQIAPLVSTMDENSKMEKSVIQGLFQQGLMGIEVDPEYGGTGASFLSTVLVIEELAKVDASVAVFCEIQNTLINTLIRKHGTEEQKATYLPQLTTEKVGSFCLSEAGAGSDSFALKTRADKEGDYYVLNGSKMWISSAEHAGLFLVMANVDPTIGYKGITSFLVDRDTPGLHIGKPENKLGLRASSTCPLTFENVKVPEANILGQIGHGYKYAIGSLNEGRIGIAAQMLGLAQGCFDYTIPYIKERIQFGKRLFDFQGLQHQVAHVATQLEAARLLTYNAARLLEAGKPFIKEASMAKYYASEIAGQTTSKCIEWMGGVGYTKDYPVEKYFRDAKIGTIYEGASNIQLNTIAKHIDAEY

SEQ ID NO: 667 - protein, 1013 aa, Homo sapiens
AHPGKICNRPIDIQATTMDGVNLSTEVVYKKGQDYRFACYDRGRACRSYRVRFLCGKPVRPKLTVTIDTNVNSTILNLEDNVQSWKPGDTLVIASTDYSMYQAEEFQVLPCRSCAPNQVKVAGKPMYLHIGEEIDGVDMRAEVGLLSRNIIVMGEMEDKCYPYRNHICNFFDFDTFGGHIKFALGFKAAHLEGTELKHMGQQLVGQYPIHFHLAGDVDERGGYDPPTYIRDLSIHHTFSRCVTVHGSNGLLIKDVVGYNSLGHCFFTEDGPEERNTFDHCLGLLVKSGTLLPSDRDSKMCKMITEDSYPGYIPKPRQDCNAVSTFWMANPNNNLINCAAAGSEETGFWFIFHHVPTGPSVGMYSPGYSEHIPLGKFYNNRAHSNYRAGMIIDNGVKTTEASAKDKRPFLSIISARYSPHQDADPLKPREPAIIRHFIAYKNQDHGAWLRGGDVWLDSCRFADNGIGLTLASGGTFPYDDGSKQEIKNSLFVGESGNVGTEMMDNRIWGPGGLDHSGRTLPIGQNFPIRGIQLYDGPINIQNCTFRKFVALEGRHTSALAFRLNNAWQSCPHNNVTGIAFEDVPITSRVFFGEPGPWFNQLDMDGDKTSVFHDVDGSVSEYPGSYLTKNDNWLVRHPDCINVPDWRGAICSGCYAQMYIQAYKTSNLRMKIIKNDFPSHPLYLEGALTRSTHYQQYQPVVTLQKGYTIHWDQTAPAELAIWLINFNKGDWIRVGLCYPRGTTFSILSDVHNRLLKQTSKTGVFVRTLQMDKVEQSYPGRSHYYWDEDSGLLFLKLKAQNEREKFAFCSMKGCERIKIKALIPKNAGVSDCTATAYPKFTERAVVDVPMPKKLFGSQLKTKDHFLEVKMESSKQHFFHLWNDFAYIEVDGKKYPSSEDGIQVVVIDGNQGRVVSHTSFRNSILQGIPWQLFNYVATIPDNSIVLMASKGRYVSRGPWTRVLEKLGADRGLKLKEQMAFVGFKGSFRPIWVTLDTEDHKAKIFQVVPIPVVKKKKL

SEQ ID NO: 668 - protein, 490 aa, Homo sapiens
MATEFIKSCCGGCFYGETEKHNFSVERDFKAAVPNSQNATISVPPLTSVSVKPQLGCTEDYLLSKLPSDGKEVPFVVPKFKLSYIQPRTQETPSHLEELEGSARASFGDRKVELSSSSQHGPSYDVYNPFYMYQHISPDLSRRFPPRSEVTRLYGSVCDLRTNKLPGSPGLSKSMFDLTNSSQRFIQRHDSLSSVPSSSSSRKNSQGSNRSLDTITLSGDERDFGRLNVKLFYNSSVEQIWITVLQCRDLSWPSSYGDTPTVSIKGILTLPKPVHFKSSAKEGSNAIEFMETFVFAIKLQNLQTVRLVFKIQTQTPRKKTIGECSMSLRTLSTQEMDYSLDITPPSKISVCHAELELGTCFQAVNSRIQLQILEARYLPSSSTPLTLSFFVKVGMFSSGELIYKKKTRLLKASNGRVKWGETMIFPLIQSEKEIVFLIKLYSRSSVRRKHFVGQIWISEDSNNIEAVNQWKETVINPEKVVIRWHKLNPS

SEQ ID NO: 669 - protein, 493 aa, Homo sapiens
MSALGVTVALLVWAAFLLLVSMWRQVHSSWNLPPGPFPLPIIGNLFQLELKNIPKSFTRLAQRFGPVFTLYVGSQRMVVMHGYKAVKEALLDYKDEFSGRGDLPAFHAHRDRGIIFNNGPTWKDIRRFSLTTLRNYGMGKQGNESRIQREAHFLLEALRKTQGQPFDPTFLIGCAPCNVIADILFRKHFDYNDEKFLRLMYLFNENFHLLSTPWLQLYNNFPSFLHYLPGSHRKVIKNVAEVKEYVSERVKEHHQSLDPNCPRDLTDCLLVEMEKEKHSAERLYTMDGITVTVADLFFAGTETTSTTLRYGLLILMKYPEIEEKLHEEIDRVIGPSRIPAIKDRQEMPYMDAVVHEIQRFITLVPSNLPHEATRDTIFRGYLIPKGTVVVPTLDSVLYDNQEFPDPEKFKPEHFLNENGKFKYSDYFKPFSTGKRVCAGEGLARMELFLLLCAILQHFNLKPLVDPKDIDLSPIHIGFGCIPPRYKLCVIPRS

SEQ ID NO: 670 - protein, 385 aa, Homo sapiens
MARENGESSSSWKKQAEDIKKIFEFKETLGTGAFSEVVLAEEKATGKLFAVKCIPKKALKGKESSIENEIAVLRKIKHENIVALEDIYESPNHLYLVMQLVSGGELFDRIVEKGFYTEKDASTLIRQVLDAVYYLHRMGIVHRDLKPENLLYYSQDEESKIMISDFGLSKMEGKGDVMSTACGTPGYVAPEVLAQKPYSKAVDCWSIGVIAYILLCGYPPFYDENDSKLFEQILKAEYEFDSPYWDDISDSAKDFIRNLMEKDPNKRYTCEQAARHPWIAGDTALNKNIHESVSAQIRKNFAKSKWRQAFNATAVVRHMRKLHLGSSLDSSNASVSSSLSLASQKDCLAPSTLCSFISSSSGVSGVGAERRPRPTTVTAVHSGSK

SEQ ID NO: 671 - protein, 99 aa, Homo sapiens
MAQGQRKFQAHKPAKSKTAAAASEKNRGPRKGGRVIAPKKARVVQQQKLKKNLEVGIRKKIEHDVVMKASSSLPKKLALLKAPAKKKGAAAATSSKTPS

SEQ ID NO: 672 - protein, 747 aa, Homo sapiens
MGRGPWDAGPSRRLLPLLLLLGLARGAAGAPGPDGLDVCATCHEHATCQQREGKKICICNYGFVGNGRTQCVDKNECQFGATLVCGNHTSCHNTPGGFYCICLEGYRATNNNKTFIPNDGTFCTDIDECEVSGLCRHGGRCVNTHGSFECYCMDGYLPRNGPEPFHPTTDATSCTEIDCGTPPEVPDGYIIGNYTSSLGSQVRYACREGFFSVPEDTVSSCTGLGTWESPKLHCQEINCGNPPEMRHAILVGNHSSRLGGVARYVCQEGFESPGGKITSVCTEKGTWRESTLTCTEILTKINDVSLFNDTCVRWQINSRRINPKISYVISIKGQRLDPMESVREETVNLTTDSRTPEVCLALYPGTNYTVNISTAPPRRSMPAVIGFQTAEVDLLEDDGSFNISIFNETCLKLNRRSRKVGSEHMYQFTVLGQRWYLANFSHATSFNFTTREQVPVVCLDLYPTTDYTVNVTLLRSPKRHSVQITIATPPAVKQTISNISGFNETCLRWRSIKTADMEEMYLFHIWGQRWYQKEFAQEMTFNISSSSRDPEVCLDLRPGTNYNVSLRALSSELPVVISLTTQITEPPLPEVEFFTVHRGPLPRLRLRKAKEKNGPISSYQVLVLPLALQSTFSCDSEGASSFFSNASDADGYVAAELLAKDVPDDAMEIPIGDRLYYGEYYNAPLKRGSDYCIILRITSEWNKVRRHSCAVWAQVKDSSLMLLQMAGVGLGSLAVVIILTFLSFSAV

SEQ ID NO: 673 - protein, 407 aa, Homo sapiens
MRRNLRLGPSSGADAQGQGAPRPGLAAPRMLLPPASQASRGSGSTGCSLMAQEVDTAQGAEMRRGAGAARGRASWCWALALLWLAVVPGWSRVSGIPSRRHWPVPYKRFDFRPKPDPYCQAKYTFCPTGSPIPVMEGDDDIEVFRLQAPVWEFKYGDLLGHLKIMHDAIGFRSTLTGKNYTMEWYELFQLGNCTFPHLRPEMDAPFWCNQGAACFFEGIDDVHWKENGTLVQVATISGNMFNQMAKWVKQDNETGIYYETWNVKASPEKGAETWFDSYDCSKFVLRTFNKLAEFGAEFKNIETNYTRIFLYSGEPTYLGNETSVFGPTGNKTLGLAIKRFYYPFKPHLPTKEFLLSLLQIFDAVIVHKQFYLFYNFEYWFLPMKFPFIKITYEEIPLPIRNKTLSGL

SEQ ID NO: 674 - protein, 579 aa, Homo sapiens
MQICGSSVASVAAGTSFQVLGPVCWQQLDLKMAVRVLWGGLSLLRVLWCLLPQTGYVHPDEFFQSPEVMAEDILGVQAARPWEFYPSSSCRSVLFPLLISGSTFWLLRLWEELGPWPGLVSGYALLVGPRLLLTALSFALDGAVYHLAPPMGADRWNALALLSGSYVTLVFYTRTFSNTIEGLLFTWLLVLVSSHVTWGPTRKEPAPGPRWRSWLLGGIVAAGFFNRPTFLAFAVVPLYLWGTRGATNPGLKSLTREALVLLPGAALTAAVFVATDSWYFSSPATSRNLVLTPVNFLHYNLNPQNLARHGTHARLTHLAVNGFLLFGVLHAQALQAAWQRLQVGLQASAQMGLLRALGARSLLSSPRSYLLLLYFMPLALLSAFSHQEARFLIPLLVPLVLLCSPQTQPVPWKGTVVLFNALGALLFGCLHQGGLVPGLEYLEQVVHAPVLPSTPTHYTLLFTHTYMPPRHLLHLPGLGAPVEVVDMGGTEDWALCQTLKSFTRQPACQVAGGPWLCRLFVVTPGTTRRAVEKCSFPFKNETLLFPHLTLEDPPALSSLLSGAWRDHLSLHIVELGEET

SEQ ID NO: 675 - protein, 99 aa, Homo sapiens
MSTAQSLKSVDYEVFGRVQGVCFRMYTEDEARKIGVVGWVKNTSKGTVTGQVQGPEDKVNSMKSWLSKVGSPSSRIDRTNFSNEKTISKLEYSNFSIRY

SEQ ID NO: 676 - protein, 622 aa, Homo sapiens
MAENTEGDLNSNLLHAPYHTGDPQLDTAIGQWLRWDKNPKTKEQIENLLRNGMNKELRDRLCCRMTFGTAGLRSAMGAGFCYINDLTVIQSTQGMYKYLERCFSDFKQRGFVVGYDTRGQVTSSCSSQRLAKLTAAVLLAKDVPVYLFSRYVPTPFVPYAVQKLKAVAGVMITASHNRKEDNGYKVYWETGAQITSPHDKEILKCIEECVEPWNGSWNDNLVDTSPLKRDPLQDICRRYMEDLKKICFYRELNSKTTLKFVHTSFHGVGHDYVQLAFKVFGFKPPIPVPEQKDPDPDFSTVKCPNPEEGESVLELSLRLAEKENARVVLATDPDADRLAAAELQENGCWKVFTGNELAALFGWWMFDCWKKNKSRNADVKNVYMLATTVSSKILKAIALKEGFHFEETLPGFKWIGSRIIDLLENGKEVLFAFEESIGFLCGTSVLDKDGVSAAVVVAEMASYLETMNITLKQQLVKVYEKYGYHISKTSYFLCYEPPTIKSIFERLRNFDSPKEYPKFCGTFAILHVRDVTTGYDSSQPNKKSVLPVSKNSQMITFTFQNGCVATLRTSGTEPKIKYYAEMCASPDQSDTALLEEELKKLIDALIENFLQPSKNGLIWRSV

SEQ ID NO: 677 - protein, 475 aa, Homo sapiens
RAAADLANSNAGAAVGRKAGPRSPPSAPAPAPPPPAPAPPTLGNNHQESPGWRCCRPTLRERNALMFNNELMADVHFVVGPPGATRTVPAHKYVLAVGSSVFYAMFYGDLAEVKSEIHIPDVEPAAFLILLKYMYSDEIDLEADTVLATLYAAKKYIVPALAKACVNFLETSLEAKNACVLLSQSRLFEEPELTQRCWEVIDAQAEMALRSEGFCEIDRQTLEIIVTREALNTKEAVVFEAVLNWAEAECKRQGLPITPRNKRHVLGRALYLVRIPTMTLEEFANGAAQSDILTLEETHSIFLWYTATNKPRLDFPLTKRKGLAPQRCHRFQSSAYRSNQWRYRGRCDSIQFAVDRRVFIAGLGLYGSSSGKAEYSVKIELKRLGVVLAQNLTKFMSDGSSNTFPVWFEHPVQVEQDTFYTASAVLDGSELSYFGQEGMTEVQCGKVAFQFQCSSDSTNGTGVQGGQIPELIFYA

SEQ ID NO: 678 - protein, 547 aa, Homo sapiens
MSSSPWEPATLRRVFVVGVGMTKFVKPGAENSRDYPDLAEEAGKKALADAQIPYSAVDQACVGYVFGDSTCGQRAIYHSLGMTGIPIINVNNNCATGSTALFMARQLIQGGVAECVLALGFEKMSKGSLGIKFSDRTIPTDKHVDLLINKYGLSAHPVAPQMFGYAGKEHMEKYGTKIEHFAKIGWKNHKHSVNNPYSQFQDEYSLDEVMASKEVFDFLTILQCCPTSDGAAAAILASEAFVQKYGLQSKAVEILAQEMMTDLPSSFEEKSIIKMVGFDMSKEAARKCYEKSGLTPNDIDVIELHDCFSTNELLTYEALGLCPEGQGATLVDRGDNTYGGKWVINPSGGLISKGHPLGATGLAQCAELCWQLRGEAGKRQVPGAKVALQHNLGIGGAVVVTLYKMGFPEAASSFRTHQIEAVPTSSASDGFKANLVFKEIEKKLEEEGEQFVKKIGGIFAFKVKDGPGGKEATWVVDVKNGKGSVLPNSDKKADCTITMADSDFLALMTGKMNPQSAFFQGKLKITGNMGLAMKLQNLQLQPGNAKL

SEQ ID NO: 679 - protein, 643 aa, Homo sapiens
MGLLPKLGVSQGSDTSTSRAGRCARSVFGNIKVFVLCQGLLQLCQLLYSAYFKSSLTTIEKRFGLSSSSSGLISSLNEISNAILIIFVSYFGSRVHRPRLIGIGGLFLAAGAFILTLPHFLSEPYQYTLASTGNNSRLQAELCQKHWQDLPPSKCHSTTQNPQKETSSMWGLMVVAQLLAGIGTVPIQPFGISYVDDFSEPSNSPLYISILFAISVFGPAFGYLLGSIMLQIFVDYGRVNTAAVNLVPGDPRWIGAWWLGLLISSALLVLTSFPFFFFPRAMPIGAKRAPATADEARKLEEAKSRGSLVDFIKRFPCIFLRLLMNSLFVLVVLAQCTFSSVIAGLSTFLNKFLEKQYGTSAAYANFLIGAVNLPAAALGMLFGGILMKRFVFSLQTIPRIATTIITISMILCVPLFFMGCSTPTVAEVYPPSTSSSIHPQSPACRRDCSCPDSIFHPVCGDNGIEYLSPCHAGCSNINMSSATSKQLIYLNCSCVTGGSASAKTGSCPVPCAHFLLPAIFLISFVSLIACISHNPLYMMVLRVVNQEEKSFAIGVQFLLMRLLAWLPSPALYGLTIDHSCIRWNSLCLGRRGACAYYDNDALRDRYLGLQMGYKALGMLLLCFISWRVKKNKEYNVQKAAGLI

SEQ ID NO: 680 - protein, 986 aa, Homo sapiens
MAGIFYFALFSCLFGICDAVTGSRVYPANEVTLLDSRSVQGELGWIASPLEGGWEEVSIMDEKNTPIRTYQVCNVMEPSQNNWLRTDWITREGAQRVYIEIKFTLRDCNSLPGVMGTCKETFNLYYYESDNDKERFIRENQFVKIDTIAADESFTQVDIGDRIMKLNTEIRDVGPLSKKGFYLAFQDVGACIALVSVRVFYKKCPLTVRNLAQFPDTITGADTSSLVEVRGSCVNNSEEKDVPKMYCGADGEWLVPIGNCLCNAGHEERSGECQACKIGYYKALSTDATCAKCPPHSYSVWEGATSCTCDRGFFRADNDAASMPCTRPPSAPLNLISNVNETSVNLEWSSPQNTGGRQDISYNVVCKKCGAGDPSKCRPCGSGVHYTPQQNGLKTTKVSITDLLAHTNYTFEIWAVNGVSKYNPNPDQSVSVTVTTNQAAPSSIALVQAKEVTRYSVALAWLEPDRPNGVILEYEVKYYEKDQNERSYRIVRTAARNTDIKGLNPLTSYVFHVRARTAAGYGDFSEPLEVTTNTVPSRIIGDGANSTVLLVSVSGSVVLVVILIAAFVISRRRSKYSKAKQEADEEKHLNQGVRTYVDPFTYEDPNQAVREFAKEIDASCIKIEKVIGVGEFGEVCSGRLKVPGKREICVAIKTLKAGYTDKQRRDFLSEASIMGQFDHPNIIHLEGVVTKCKPVMIITEYMENGSLDAFLRKNDGRFTVIQLVGMLRGIGSGMKYLSDMSYVHRDLAARNILVNSNLVCKVSDFGMSRVLEDDPEAAYTTRGGKIPIRWTAPEAIAYRKFTSASDVWSYGIVMWEVMSYGERPYWDMSNQDVIKAIEEGYRLPPPMDCPIALHQLMLDCWQKERSDRPKFGQIVNMLDKLIRNPNSLKRTGTESSRPNTALLDPSSPEFSAVVSVGDWLQAIKMDRYKDNFTAAGYTTLEAVVHVNQEDLARIGITAITHQNKILSSVQAMRTQMQQMHGRMVPV

SEQ ID NO: 681 - protein, 290 aa, Homo sapiens
MDIEAYFERIGYKNSRNKLDLETLTDILEHQIRAVPFENLNMHCGQAMELGLEAIFDHIVRRNRGGWCLQVNQLLYWALTTIGFQTTMLGGYFYIPPVNKYSTGMVHLLLQVTIDGRNYIVDAGSGSSSQMWQPLELISGKDQPQVPCIFCLTEERGIWYLDQIRREQYITNKEFLNSHLLPKKKHQKIYLFTLEPRTIEDFESMNTYLQTSPTSSFITTSFCSLQTPEGVYCLVGFILTYRKFNYKDNTDLVEFKTLTEEEVEEVLKNIFKISLGRNLVPKPGDGSLTI

SEQ ID NO: 682 - protein, 682 aa, Homo sapiens
MNPQQQRMAAIGTDKELSDLLDFSAMFSPPVNSGKTRPTTLGSSQFSGSGIDERGGTTSWGTSGQPSPSYDSSRGFTDSPHYSDHLNDSRLGAHEGLSPTPFMNSNLMGKTSERGSFSLYSRDTGLPGCQSSLLRQDLGLGSPAQLSSSGKPGTAYYSFSATSSRRRPLHDSAALDPLQAKKVRKVPPGLPSSVYAPSPNSDDFNRESPSYPSPKPPTSMFASTFFMQDGTHNSSDLWSSSNGMSQPGFGGILGTSTSHMSQSSSYGNLHSHDRLSYPPHSVSPTDINTSLPPMSSFHRGSTSSSPYVAASHTPPINGSDSILGTRGNAAGSSQTGDALGKALASIYSPDHTSSSFPSNPSTPVGSPSPLTGTSQWPRPGGQAPSSPSYENSLHSLQSRMEDRLDRLDDAIHVLRNHAVGPSTSLPAGHSDIHSLLGPSHNAPIGSLNSNYGGSSLVASSRSASMVGTHREDSVSLNGNHSVLSSTVTTSSTDLNHKTQENYRGGLQSQSGTVVTTEIKTENKEKDENLHEPPSSDDMKSDDESSQKDIKVSSRGRTSSTNEDEDLNPEQKIEREKERRMANNARERLRVRDINEAFKELGRMCQLHLKSEKPQTKLLILHQAVAVILSLEQQVRERNLNPKAACLKRREEEKVSAVSAEPPTTLPGTHPGLSETTNPMGHM

SEQ ID NO: 683 - protein, 234 aa, Homo sapiens
RFLSVHTRVNQPGMLCSFQIPEAWSCAWSLNTRAYHCFSAGLSQQVLLTSVATGHQQSFDTSSDVLAQQFASTAPLLFNGCRSGEIFAIDLRCRNRGKGWRATRLFHDSAVTSVQILQEEQCLMASDMTGKIKLWDLRATKCVRQYEGHVNESAYLPLHVHEEEGIVVAVGQDCYTRIWSLHDAHLLRTIPSPYSASEDDIPSVAFASRLGGIRGAAPGLLMAVRQDLYCFPFS

SEQ ID NO: 684 - protein, 261 aa, Homo sapiens
MLRVLCLLRPWRPLRARGCASDGAAGGSEIQVRALAGPDQGITEILMNRPSARNALGNVFVSELLETLAQLREDRQVRVLLFRSGVKGAFCAGADLKEREQMSEAEVGVFVQRLRGLMNDIASSAVMGLIETTRGLLPGAGGTQRLPRCLGVALAKELIFTGRRLSGTEAHVLGLVNHAVAQNEEGDAAYQRARALAQEILPQAPIAVRLGKVAINRGTEVDIASGMAIEGMCYAQNIPTRDRLEGMAAFREKRTPKFVGK

SEQ ID NO: 685 - protein, 1203 aa, Homo sapiens
MDLRDFYLLAALIACLRLDSAIAQELIYTIREELPENVPIGNIPKDLNISHINAATGTSASLVYRLVSKAGDAPLVKVSSSTGEIFTTSNRIDREKLCAGASYAEENECFFELEVVILPNDFFRLIKIKIIVKDTNDNAPMFPSPVINISIPENTLINSRFPIPSATDPDTGFNGVQHYELLNGQSVFGLDIVETPEGEKWPQLIVQQNLDREQKDTYVMKIKVEDGGTPQKSSTAILQVTVSDVNDNRPVFKEGQVEVHIPENAPVGTSVIQLHATDADIGSNAEIRYIFGAQVAPATKRLFALNNTTGLITVQRSLDREETAIHKVTVLASDGSSTPARATVTINVTDVNDNPPNIDLRYIISPINGTVYLSEKDPVNTKIALITVSDKDTDVNGKVICFIEREVPFHLKAVYDNQYLLETSSLLDYEGTKEFSFKIVASDSGKPSLNQTALVRVKLEDENDNPPIFNQPVIELSVSENNRRGLYLTTISATDEDSGKNADIVYQLGPNASFFDLDRKTGVLTASRVFDREEQERFIFTVTARDNGTPPLQSQAAVIVTVLDENDNSPKFTHNHFQFFVSENLPKYSTVGVITVTDADAGENKAVTLSILNDNDNFVLDPYSGVIKSNVSFDREQQSSYTFDVKATDGGQPPRSSTAKVTINVMDVNDNSPVVISPPSNTSFKLVPLSAIPGSVVAEVFAVDVDTGMNAELKYTIVSGNNKGLFRIDPVTGNITLEEKPAPTDVGLHRLVVNISDLGYPKSLHTLVLVFLYVNDTAGNASYIYDLIRRTMETPLDRNIGDSSQPYQNEDYLTIMIAIIAGAMVVIVVIFVTVLVRCRHASRFKAAQRSKQGAEWMSPNQENKQNKKKKRKKRKSPKSSLLNFVTIEESKPDDAVHEPINGTISLPAELEEQSIGRFDWGPAPPTTFKPNSPDLAKHYKSASPQPAFHLKPDTPVSVKKHHVIQELPLDNTFVGGCDTLSKRSSTSSDHFSASECSSQGGFKTKGPLHTRQSQRRVTFHLPDGSQESCSDSGLGDHEPVGSGTLISHPLPLVQPQDEFYDQASPDKRTEADGNSDPNSDGPLGPRGLAEATEMCTQECLVLGHSDNCWMPPGLGPYQHPKSPLSTFAPQKEWVKKDKLVNGHTLTRAWKEDSNRNQFNDRKQYGSNEGHFNNGSHMTDIPLANLKSYKQAGGATESPKEHQL

SEQ ID NO: 686 - protein, 262 aa, Homo sapiens
MWFLVLCLALSLGGTGAAPPIQSRIVGGWECEQHSQPWQAALYHFSTFQCGGILVHRQWVLTAAHCISDNYQLWLGRHNLFDDENTAQFVHVSESFPHPGFNMSLLENHTRQADEDYSHDLMLLRLTEPADTITDAVKVVELPTEEPEVGSTCLASGWGSIEPENFSFPDDLQCVDLKILPNDECKKAHVQKVTDFMLCVGHLEGGKDTCVGDSGGPLMCDGVLQGVTSWGYVPCGTPNKPSVAVRVLSYVKWIEDTIAENS

SEQ ID NO: 687 - protein, 351 aa, Homo sapiens
MAAAPLKVCIVGSGNWGSAVAKIIGNNVKKLQKFASTVKMWVFEETVNGRKLTDIINNDHENVKYLPGHKLPENVVAMSNLSEAVQDADLLVFVIPHQFIHRICDEITGRVPKKALGITLIKGIDEGPEGLKLISDIIREKMGIDISVLMGANIANEVAAEKFCETTIGSKVMENGLLFKELLQTPNFRITVVDDADTVELCGALKNIVAVGAGFCDGLRCGDNTKAAVIRLGLMEMIAFARIFCKGQVSTATFLESCGVADLITTCYGGRNRRVAEAFARTGKTIEELEKEMLNGQKLQGPQTSAEVYRILKQKGLLDKFPLFTAVYQICYESRPVQEMLSCLQSHPEHT

SEQ ID NO: 688 - protein, 678 aa, Homo sapiens
MAAAAGDGGGEGGAGLGSAAGLGPGPGLRGQGPSAEAHEGAPDPMPAALHPEEVAARLQRMQRELSNRRKILVKNLPQDSNCQEVHDLLKDYDLKYCYVDRNKRTAFVTLLNGEQAQNAIQMFHQYSFRGKDLIVQLQPTDALLCITNVPISFTSEEFEELVRAYGNIERCFLVYSEVTGHSKGYGFVEYMKKDFAAKARLELLGRQLGASALFAQWMDVNLLASELIHSKCLCIDKLPSDYRDSEELLQIFSSVHKPVFCQLAQDEGSYVGGFAVVEYSTAEQAEEVQQAADGMTIKGSKVQVSFCAPGAPGRSTLAALIAAQRVMHSNQKGLLPEPNPVQIMKSLNNPAMLQVLLQPQLCGRAVKPAVLGTPHSLPHLMNPSISPAFLHLNKAHQNLSHIPLAQQQLMKFENIHTNNKPGLLGEPPAVVLQTALGIGSVLPLKKELGHHHGEAHKTSSLIPTQTTITAGMGMLPFFPNQHIAGQAGPGHSNTQEKQPATVGMAEGNFSGSQPYLQSFPNLAAGSLLVGHHKQQQSQPKGTEISSGAASKNQTSLLGEPPKEIRLSKNPYLNLASVLPSVCLSSPASKTTLHKTGIASSILDAISQGSESQHALEKCIAYSPPFGDYAQVSSLRNEKRGSSYLISAPEGGSVECVDQHSQGTGAYYMETYLKKKRVY

SEQ ID NO: 689 - protein, 438 aa, Homo sapiens
MQAEDRSQFGSAAEMLSEQTAALGTGWESMNVQLDGAEPQVERGSQEERPWRTVPGPLEHLCCDLEEEPQSLQEKAQSAPWVPAIPQEGNTGDWEMAAALLAAGSQGLVTIKDVSLCFSQEEWRSLDPSQTDFYGEYVMQENCGIVVSLRFPIPKLDMLSQLEGGEEQWVPDPQDLEERDILRVTYTGGGSEHEGDTPELEAEPPRMLSSVSEDTVLWNPEHDESWDSMPSSSRGMLLGPPFLQEDSFSNLLCSTEMDSLLRPHTCPQCGKQFVWGSHLARHQQTHTGERPYSCLKCEKTFGRRHHLIRHQKTHLHDKTSRCSECGKNFRCNSHLASHQRVHAEGKSCKGQEVGESPGTRKRQRAPPVPKCHVCTECGKSFGRRHHLVRHWLTHTGEKPFQCPRCEKSFGRKHHLDRHLLTHQGQSPRNSWDRGTSVF

SEQ ID NO: 690 - protein, 204 aa, Homo sapiens
MGADGFVPLGTLLQLPQFRGFSAEDVQRVVDTNRKQRFALQLGDPSTGLLIRANQGHSLQVPKLELMPLETPQALPPMLVHGTFWKHWPSILLKGLSCQGRTHIHLAPGLPGDPGIISGMRSHCEIAVFIDGPLALADGIPFFRSANGVILTPGNTDGFLLPKYFKEALQLRPTRKPLSLAGDEETECQSSPKHSSRERRRIQQ

SEQ ID NO: 691 - protein, 723 aa, Homo sapiens
MGSRCALALAVLSALLCQVWSSGVFELKLQEFVNKKGLLGNRNCCRGGAGPPPCACRTFFRVCLKHYQASVSPEPPCTYGSAVTPVLGVDSFSLPDGGGADSAFSNPIRFPFGFTWPGTFSLIIEALHTDSPDDLATENPERLISRLATQRHLTVGEEWSQDLHSSGRTDLKYSYRFVCDEHYYGEGCSVFCRPRDDAFGHFTCGERGEKVCNPGWKGPYCTEPICLPGCDEQHGFCDKPGECKCRVGWQGRYCDECIRYPGCLHGTCQQPWQCNCQEGWGGLFCNQDLNYCTHHKPCKNGATCTNTGQGSYTCSCRPGYTGATCELGIDECDPSPCKNGGSCTDLENSYSCTCPPGFYGKICELSAMTCADGPCFNGGRCSDSPDGGYSCRCPVGYSGFNCEKKIDYCSSSPCSNGAKCVDLGDAYLCRCQAGFSGRHCDDNVDDCASSPCANGGTCRDGVNDFSCTCPPGYTGRNCSAPVSRCEHAPCHNGATCHQRGHGYVCECARSYGGPNCQFLLPELPPGPAVVDLTEKLEGQGGPFPWVAVCAGVILVLMLLLGCAAVVVCVRLRLQKHRPPADPCRGETETMNNLANCQREKDISVSIIGATQIKNTNKKADFHGDHSADKNGFKARYPAVDYNLVQDLKGDDTAVRDAHSKRDTKCQPQGSSGEEKGTPTTLRGGEASERKRPDSGCSTSKDTKYQSVYVISEEKDECVIATEV

SEQ ID NO: 692 - protein, 902 aa, Homo sapiens
MKIAVIGQSLFGQEVYCHLRKEGHEVVGVFTVPDKDGKADPLGLEAEKDGVPVFKYSRWRAKGQALPDVVAKYQALGAELNVLPFCSQFIPMEIISAPRHGSIIYHPSLLPRHRGASAINWTLIHGDKKGGFSIFWADDGLDTGDLLLQKECEVLPDDTVSTLYNRFLFPEGIKGMVQAVRLIAEGKAPRLPQPEEGATYEGIQKKETAKINWDQPAEAIHNWIRGNDKVPGAWTEACEQKLTFFNSTLNTSGLVPEGDALPIPGAHRPGVVTKAGLILFGNDDKMLLVKNIQLEDGKMILASNFFKGAASSVLELTEAELVTAEAVRSVWQRILPKVLEVEDSTDFFKSGAASVDVVRLVEEVKELCDGLELENEDVYMASTFGDFIQLLVRKLRGDDEEGECSIDYVEMAVNKRTVRMPHQLFIGGEFVDAEGAKTSETINPTDGSVICQVSLAQVTDVDKAVAAAKDAFENGRWGKISARDRGRLMYRLADLMEQHQEELATIEALDAGAVYTLALKTHVGMSIQTFRYFAGWCDKIQGSTIPINQARPNRNLTLTRKEPVGVCGIIIPWNYPLMMLSWKTAACLAAGNTVVIKPAQVTPLTALKFAELTLKAGIPKGVVNVLPGSGSLVGQRLSDHPDVRKIGFTGSTEVGKHIMKSCAISNVKKVSLELGGKSPLIIFADCDLNKAVQMGMSSVFFNKGENCIAAGRLFVEDSIHDEFVRRVVEEVRKMKVGNPLDRDTDHGPQNHHAHLVKLMEYCQHGVKEGATLVCGGNQVPRPGFFFEPTVFTDVEDHMFIAKEESFGPVMIISRFADGDLDAVLSRANATEFGLASGVFTRDINKALYVSDKLQAGTVFVNTYNKTDVAAPFGGFKQSGFGKDLGEAALNEYLRVKTVTFEY

SEQ ID NO: 693 - protein, 836 aa, Homo sapiens
MKPSPAGTAKELEPPAPARGEQRTAEPEGRWREKGEADTERQRTRERQEATLAGLAELEYLRQRQELLVRGALRGAGGAGAAAPRAGELLGEAAQRSRLEEKFLEENILLLRKQLNCLRRRDAGLLNQLQELDKQISDLRLDVEKTSEEHLETDSRPSSGFYELSDGASGSLSNSSNSVFSECLSSCHSSTCFCSPLEATLSLSDGCPKSADLIGLLEYKEGHCEDQASGAVCRSLSTPQFNSLDVIADVNPKYQCDLVSKNGNDVYRYPSPLHAVAVQSPMFLLCLTGNPLREEDRLGNHASDICGGSELDAVKTDSSLPSPSSLWSASHPSSSKKMDGYILSLVQKKTHPVRTNKPRTSVNADPTKGLLRNGSVCVRAPGGVSQGNSVNLKNSKQACLPSGGIPSLNNGTFSPPKQWSKESKAEQAESKRVPLPEGCPSGAASDLQSKHLPKTAKPASQEHARCSAIGTGESPKESAQLSGASPKESPSRGPAPPQENKVVQPLKKMSQKNSLQGVPPATPPLLSTAFPVEERPALDFKSEGSSQSLEEAHLVKAQFIPGQQPSVRLHRGHRNMGVVKNSSLKHRGPALQGLENGLPTVREKTRAGSKKCRFPDDLDTNKKLKKASSKGRKSGGGPEAGVPGRPAGGGHRAGSRAHGHGREAVVAKPKHKRTDYRRWKSSAEISYEEALRRARRGRRENVGLYPAPVPLPYASPYAYVASDSEYSAECESLFHSTVVDTSEDEQSNYTTNCFGDSESSVSEGEFVGESTTTSDSEESGGLIWSQFVQTLPIQTVTAPDLHNHPAKTFVKIKASHNLKKKILRFRSGSLKLMTTV

SEQ ID NO: 694 - protein, 797 aa, Homo sapiens
MAHRCLRLWGRGGCWPRGLQQLLVPGGVGPGEQPCLRTLYRFVTTQARASRNSLLTDIIAAYQRFCSRPPKGFGKYFPNGKNGKKASEPKEVMGEKKESKPAATTRSSGGGGGGGGKRGGKKDDSHWWSRFQKGDIPWDDKDFRMFFLWTALFWGGVMFYLLLKRSGREITWKDFVNNYLSKGVVDRLEVVNKRFVRVTFTPGKTPVDGQYVWFNIGSVDTFERNLETLQQELGIEGENRVPVVYIAESDGSFLLSMLPTVLIIAFLLYTIRRGPAGIGRTGRGMGGLFSVGETTAKVLKDEIDVKFKDVAGCEEAKLEIMEFVNFLKNPKQYQDLGAKIPKGAILTGPPGTGKTLLAKATAGEANVPFITVSGSEFLEMFVGVGPARVRDLFALARKNAPCILFIDEIDAVGRKRGRGNFGGQSEQENTLNQLLVEMDGFNTTTNVVILAGTNRPDILDPALLRPGRFDRQIFIGPPDIKGRASIFKVHLRPLKLDSTLEKDKLARKLASLTPGFSGADVANVCNEAALIAARHLSDSINQKHFEQAIERVIGGLEKKTQVLQPEEKKTVAYHEAGHAVAGWYLEHADPLLKVSIIPRGKGLGYAQYLPKEQYLYTKEQLLDRMCMTLGGRASEEIFFGRITTGAQDDLRKVTQSAYAQIVQFGMNEKVGQISFDLPRQGDMVLEKPYSEATARLIDDEVRILINDAYKRTVALLTEKKADVEKVALLLLEKEVLDKNDMVELLGPRPFAEKSTYEEFVEGTGSLDEDTSLPEGLKDWNKEREKEKEEPPGEKVAN

SEQ ID NO: 695 - protein, 128 aa, Homo sapiens [sequence omitted]

SEQ ID NO: 696 - protein, 657 aa, Homo sapiens
MRLKIGFILRSLLVVGSFLGLVVLWSSLTPRPDDPSPLSRMREDRDVNDPMPNRGGNGLAPGEDRFKPVVPWPHVEGVEVDLESIRRINKAKNEQEHHAGGDSQKDIMQRQYLTFKPQTFTYHDPVLRPGILGNFEPKEPEPPGVVGGPGEKAKPLVLGPEFKQAIQASIKEFGFNMVASDMISLDRNVNDLRQEECKYWHYDENLLTSSVVIVFHNEGWSTLMRTVHSVIKRTPRKYLAEIVLIDDFSNKEHLKEKLDEYIKLWNGLVKVFRNERREGLIQARSIGAQKAKLGQVLIYLDAHCEVAVNWYAPLVAPISKDRTICTVPLIDVINGNTYEIIPQGGGDEDGYARGAWDWSMLWKRVPLTPQEKRLRKTKTEPYRSPAMAGGLCAIEREFFFELGLYDPSLQIWGGENFEISYKIWQCGGKLLFVPCSRVGHIYRLEGWQGNPPPIYVGSSPTLKNYVRVVEVWWDEYKDYFYASRPESQALPYGDISELKKFREDHNCQSFKWFMEEIAYDITSHYPLPPKNVDWGEIRGFETAYCIDSMGKTNGGFVELGPCHRMGGNQLFRINEANQLMQYDQCLTKGADGSKVMITHCNLNEFKEWQYFKNLHRFTHIPSGKCLDRSEVLHQVFISNCDSSKTTQKWEMNNIHSV

SEQ ID NO: 697 - protein, 250 aa, Homo sapiens [sequence omitted]

SEQ ID NO: 698 - protein, 472 aa, Homo sapiens
MLGTVKMEGHETSDWNSYYADTQEAYSSVPVSNMNSGLGSMNSMNTYMTMNTMTTSGNMTPASFNMSYANPGLGAGLSPGAVAGMPGGSAGAMNSMTAAGVTAMGTALSPSGMGAMGAQQAASMNGLGPYAAAMNPCMSPMAYAPSNLGRSRAGGGGDAKTFKRSYPHAKPPYSYISLITMAIQQAPSKMLTLSEIYQWIMDLFPYYRQNQQRWQNSIRHSLSFNDCFVKVARSPDKPGKGSYWTLHPDSGNMFENGCYLRRQKRFKCEKQPGAGGGGGSGSGGSGAKGGPESRKDPSGASNPSADSPLHRGVHGKTGQLEGAPAPGPAASPQTLDHSGATATGGASELKTPASSTAPPISSGPGALASVPASHPAHGLAPHESQLHLKGDPHYSFNHPFSINNLMSSSEQQHKLDFKAYEQALQYSPYGSTLPASLPLGSASVTTRSPIEPSALEPAYYQGVYSRPVLNTS

SEQ ID NO: 699 - protein, 566 aa, Homo sapiens
MGSAGFSVGKFHVEVASRGRECVSGTPECGNRLGSAGFGDLCLELRGADPAWGPFAAHGRSRRQGSRFLWLLKILVIILVLGIVGFMFGSMFLQAVFSSPKPELPSPAPGVQKLKLLPEERLRNLFSYDGIWLFPKNQCKCEANKEQGGYNFQDAYGQSDLPAVKARRQAEFEHFQRREGLPRPLPLLVQPNLPFGYPVHGVEVMPLHTVPIPGLQFEGPDAPVYEVTLTASLGTLNTLADVPDSVVQGRGQKQLIISTSDRKLLKFILQHVTYTSTGYQHQKVDIVSLESRSSVAKFPVTIRHPVIPKLYDPGPERKLRNLVTIATKTFLRPHKLMIMLRSIREYYPDLTVIVADDSQKPLEIKDNHVEYYTMPFGKGWFAGRNLAISQVTTKYVLWVDDDFLFNEETKIEVLVDVLEKTELDVVGGSVLGNVFQFKLLLEQSENGACLHKRMGFFQPLDGFPSCVVTSGVVNFFLAHTERLQRVGFDPRLQRVAHSEFFIDGLGTLLVGSCPEVIIGHQSRSPVVDSELAALEKTYNTYRSNTLTRVQFKLALHYFKNHLQCAA

SEQ ID NO: 700 - protein, 198 aa, Homo sapiens
MHHRNDSQRLGKAGCPPEPSLQMANTNFLSTLSPEHCRPLAGECMNKLKCGAAEAEIMNLPERVGTFSAIPALGGISLPPGVIVMTALHSPAAASAAVTDSAFQIANLADCPQNHSSSSSSSSGGAGGANPAKKKRKRCGVCVPCKRLINCGVCSSCRNRKTGHQICKFRKCEELKKKPGTSLERTPVPSAEAFRWFF

SEQ ID NO: 701 - protein, 999 aa, Homo sapiens
MEAAHLLPAADVLRHFSVTAEGGLSPAQVTGARERYGPNELPSEEGKSLWELVLEQFEDLLVRILLLAALVSFVLAWFEEGEETTTAFVEPLVIMLILVANAIVGVWQERNAESAIEALKEYEPEMGKVIRSDRKGVQRIRARDIVPGDIVEVAVGDKVPADLRLIEIKSTTLRVDQSILTGESVSVTKHTEAIPDPRAVNQDKKNMLFSGTNITSGKAVGVAVATGLHTELGKIRSQMAAVEPERTPLQRKLDEFGRQLSHAISVICVAVWVINIGHFADPAHGGSWLRGAVYYFKIAVALAVAAIPEGLPAVITTCLALGTRRMARKNAIVRSLPSVETLGCTSVICSDKTGTLTTNQMSVCRMFVVAEADAGSCLLHEFTISGTTYTPEGEVRQGDQPVRCGQFDGLVELATICALCNDSALDYNEAKGVYEKVGEATETALTCLVEKMNVFDTDLQALSRVERAGACNTVIKQLMRKEFTLEFSRDRKSMSVYCTPTRPHPTGQGSKMFVKGAPESVIERCSSVRVGSRTAPLTPTSREQILAKIRDWGSGSDTLRCLALATRDAPPRKEDMELDDCSKFVQYETDLTFVGCVGMLDPPRPEVAACITRCYQAGIRVVMITGDNKGTAVAICRRLGIFGDTEDVAGKAYTGREFDDLSPEQQRQACRTARCFARVEPAHKSRIVENLQSFNEITAMTGDGVNDAPALKKAEIGIAMGSGTAVAKSAAEMVLSDDNFASIVAAVEEGRAIYSNMKQFIRYLISSNVGEVVCIFLTAILGLPEALIPVQLLWVNLVTDGLPATALGFNPPDLDIMEKLPRSPREALISGWLFFRYLAIGVYVGLATVAAATWWFVYDAEGPHINFYQLRNFLKCSEDNPLFAGIDCEVFESRFPTTMALSVLVTIEMCNALNSVSENQSLLRMPPWMNPWLLVAVAMSMALHFLILLVPPLPLIFQVTPLSGRQWVVVLQISLPVILLDEALKYLSRNHMHEEMSQK

SEQ ID NO: 702 - protein, 387 aa, Homo sapiens; identical to SEQ ID NO: 556

SEQ ID NO: 703 - protein, 342 aa, Homo sapiens
MDDKPNPEALSDSSERLFSFGVIADVQFADLEDGFNFQGTRRRYYRHSLLHLQGAIEDWNNESSMPCCVLQLGDIIDGYNAQYNASKKSLELVMDMFKRLKVPVHHTWGNHEFYNFSREYLTHSKLNTKFLEDQIVHHPETMPSEDYYAYHFVPFPKFRFILLDAYDLSVLGVDQSSPKYEQCMKILREHNPNTELNSPQGLSEPQFVQFNGGFSQEQLNWLNEVLTFSDTNQEKVVIVSHLPIYPDASDNVCLAWNYRDALAVIWSHECVVCFFAGHTHDGGYSEDPFGVYHVNLEGVIETAPDSQAFGTVHVYPDKMMLKGRGRVPDRIMNYKKERAFHC

SEQ ID NO: 704 - protein, 329 aa, Homo sapiens
MVSKSRWKLLAMLALVLVVMVWYSISREDSFYFPIPEKKEPCLQGEAESKASKLFGNYSRDQPIFLRLEDYFWVKTPSAYELPYGTKGSEDLLLRVLAITSSSIPKNIQSLRCRRCVVVGNGHRLRNSSLGDAINKYDVVIRLNNAPVAGYEGDVGSKTTMRLFYPESAHFDPKVENNPDTLLVLVAFKAMDFHWIETILSDKKRVRKGFWKQPPLIWDVNPKQIRILNPFFMEIAADKLLSLPMQQPRKIKQKPTTGLLAITLALHLCDLVHIAGFGYPDAYNKKQTIHYYEQITLKSMAGSGHNVSQEALAIKRMLEMGAIKNLTSF

SEQ ID NO: 705 - protein, 1093 aa, Homo sapiens
MAGAAGLTAEVSWKVLERRARTKRSGSVYEPLKSINLPRPDNETLWDKLDHYYRIVKSTLLLYQSPTTGLFPTKTCGGDQKAKIQDSLYCAAGAWALALAYRRIDDDKGRTHELEHSAIKCMRGILYCYMRQADKVQQFKQDPRPTTCLHSVFNVHTGDELLSYEEYGHLQINAVSLYLLYLVEMISSGLQIIYNTDEVSFIQNLVFCVERVYRVPDFGVWERGSKYNNGSTELHSSSVGLAKAALEAINGFNLFGNQGCSWSVIFVDLDAHNRNRQTLCSLLPRESRSHNTDAALLPCISYPAFALDDEVLFSQTLDKVVRKLKGKYGFKRFLRDGYRTSLEDPNRCYYKPAEIKLFDGIECEFPIFFLYMMIDGVFRGNPKQVQEYQDLLTPVLHHTTEGYPVVPKYYYVPADFVEYEKNNPGSQKRFPSNCGRDGKLFLWGQALYIIAKLLADELISPKDIDPVQRYVPLKDQRNVSMRFSNQGPLENDLVVHVALIAESQRLQVFLNTYGIQTQTPQQVEPIQIWPQQELVKAYLQLGINEKLGLSGRPDRPIGCLGTSKIYRILGKTVVCYPIIFDLSDFYMSQDVFLLIDDIKNALQFIKQYWKMHGRPLFLVLIREDNIRGSRFNPILDMLAALKKGIIGGVKVHVDRLQTLISGAVVEQLDFLRISDTEELPEFKSFEELEPPKHSKVKRQSSTPSAPELGQQPDVNISEWKDKPTHEILQKLNDCSCLASQAILLGILLKREGPNFITKEGTVSDHIERVYRRAGSQKLWLAVRYGAAFTQKFSSSIAPHITTFLVHGKQVTLGAFGHEEEVISNPLSPRVIQNIIYYKCNTHDEREAVIQQELVIHIGWIISNNPELFSGMLKIRIGWIIHAMEYELQIRGGDKPALDLYQLSPSEVKQLLLDILQPQQNGRCWLNRRQIDGSLNRTPTGFYDRVWQILERTPNGIIVAGKHLPQQPTLSDMTMYEMNFSLLVEDTLGNIDQPQYRQIVVELLMVVSIVLERNPELEFQDKVDLDRLVKEAFNEFQKDQSRLKEIEKQDDMTSFYNTPPLGKRGTCSYLTKAVMNLLLEGEVKPNNDDPCLIS

SEQ ID NO: 706 - protein, 2022 aa, Homo sapiens
MATGGGPFEDGMNDQDLPNWSNENVDDRLNNMDWGAQQKKANRSSEKNKKKFGVESDKRVTNDISPESSPGVGRRRTKTPHTFPHSRYMSQMSVPEQAELEKLKQRINFSDLDQRSIGSDSQGRATAANNKRQLSENRKPFNFLPMQINTNKSKDASTSPPNRETIGSAQCKELFASALSNDLLQNCQVSEEDGRGEPAMESSQIVSRLVQIRDYITKASSMREDLVEKNERSANVERLTHLIDHLKEQEKSYMKFLKKILARDPQQEPMEEIENLKKQHDLLKRMLQQQEQLRALQGRQAALLALQHKAEQAIAVMDDSVVAETAGSLSGVSITSELNEELNDLIQRFHNQLRDSQPPAVPDNRRQAESLSLTREVSQSRKPSASERLPDEKVELFSKMRVLQEKKQKMDKLLGELHTLRDQHLNNSSSSPQRSVDQRSTSAPSASVGLAPVVNGESNSLTSSVPYPTASLVSQNESENEGHLNPSEKLQKLNEVRKRLNELRELVHYYEQTSDMMTDAVNENRKDEETEESEYDSEHENSEPVTNIRNPQVASTWNEVNSHSNAQCVSNNRDGRTVNSNCEINNRSAANIRALNMPPSLDCRYNREGEQEIHVAQGEDDEEEEEEAEEEGVSGASLSSHRSSLVDEHPEDAEFEQKINRLMAAKQKLRQLQDLVAMVQDDDAAQGVISASASNLDDFYPAEEDTKQNSNNTRGNANKTQKDTGVNEKAREKFYEAKLQQQQRELKQLQEERKKLIDIQEKIQALQTACPDLQLSAASVGNCPTKKYMPAVTSTPTVNQHETSTSKSVFEPEDSSIVDNELWSEMRRHEMLREELRQRRKQLEALMAEHQRRQGLAETASPVAVSLRSDGSENLCTPQQSRTEKTMATWGGSTQCALDEEGDEDGYLSEGIVRTDEEEEEEQDASSNDNFSVCPSNSVNHNSYNGKETKNRWKNNCPFSADENYRPLAKTRQQNISMQRQENLRWVSELSYVEEKEQWQEQINQLKKQLDFSVSICQTLMQDQQTLSCLLQTLLTGPYSVMPSNVASPQVHFIMHQLNQCYTQLTWQQNNVQRLKQMLNELMRQQNQHPEKPGGKERGSSASHPPSPSLFCPFSFPTQPVNLFNIPGFTNFSSFAPGMNFSPLFPSNFGDFSQNISTPSEQQQPLAQNSSGKTEYMAFPKPFESSSSIGAEKPRNKKLPEEEVESSRTPWLYEQEGEVEKPFIKTGFSVSVEKSTSSNRKNQLDTNGRRRQFDEESLESFSSMPDPVDPTTVTKTFKTRKASAQASLASKDKTPKSKSKKRNSTQLKSRVKNIRYESASMSSTCEPCKSRNRHSAQTEEPVQAKVFSRKNHEQLEKIIKCNRSTEISSETGSDFSMFEALRDTIYSEVATLISQNESRPHFLIELFHELQLLNTDYLRQRALYALQDIVSRHISESHEKGENVKSVNSGTWIASNSELTPSESLATTDDETFEKNFERETHKISEQNDADNASVLSVSSNFEPFATDDLGNTVIHLDQALARMREYERMKTEAESNSNMRCTCRIIEDGDGAGAGTTVNNLEETPVIENRSSQQPVSEVSTIPCPRIDTQQLDRQIKAIMKEVIPFLKEHMDEVCSSQLLTSVRRMVLTLTQQNDESKEFVKFFHKQLGSILQDSLAKFAGRKLKDCGEDLLVEISEVLFNELAFFKLMQDLDNNSITVKQRCKRKIEATGVIQSCAKEAKRILEDHGSPAGEIDDEDKDKDETETVKQTQTSEVYDGPKNVRSDISDQEEDEESEGCPVSINLSKAETQALTNYGSGEDENEDEEMEEFEEGPVDVQTSLQANTEATEENEHDEQVLQRDFKKTAESKNVPLEREATSKKNNCPVKPCYLNILEDEQPLNSAAHKESPPTVDSTQQPNPLPLRLPEMEPLVPRVKEVKSAQETPESSLAGSPDTESPVLVNDYEAESGNISQKSDEEDFVKVEDLPLKLTIYSEADLRKKMVEEEQKNHLSGEICEMQTEELAGNSETLKEPETVGAQSI

SEQ ID NO: 707 - protein, 544 aa, Homo sapiens; identical to SEQ ID NO: 554

SEQ ID NO: 708 - protein, 147 aa, Homo sapiens; identical to SEQ ID NO: 546

SEQ ID NO: 709 - protein, 261 aa, Homo sapiens
MVVVAAAPNPADGTPKVLLLSGQPASAAGAPAGQALPLMVPAQRGASPEAASGGLPQARKRQRLTHLSPEEKALRRKLKNRVAAQTARDRKKARMSELEQQVVDLEEENQKLLLENQLLREKTHGLVVENQELRQRLGMDALVAEEEAEAKGNEVRPVAGSAESAALRLRAPLQQVQAQLSPLQNISPWILAVLTLQIQSLISCWAFWTTWTQSCSSNALPQSLPAWRSSQRSTQKDPVPYQPPFLCQWGRHQPSWKPLMN

SEQ ID NO: 710 - protein, 551 aa, Homo sapiens; identical to SEQ ID NO: 560

SEQ ID NO: 711 - protein, 698 aa, Homo sapiens
MMRSRSKSPRRPSPTARGANCDVELLKTTTRDREELKCMLEKYERHLAEIQGNVKVLKSERDKIFLLYEQAQEEITRLRREMMKSCKSPKSTTAHAILRRVETERDVAFTDLRRMTTERDSLRERLKIAQETAFNEKAHLEQRIEELECTVHNLDDERMEQMSNMTLMKETISTVEKEMKSLARKAMDTESELGRQKAENNSLRLLYENTEKDLSDTQRHLAKKKYELQLTQEKIMCLDEKIDNFTRQNIAQREEISILGGTLNDLAKEKECLQACLDKKSENIASLGESLAMKEKTISGMKNIIAEMEQASRQCTEALIVCEQDVSRMRRQLDETNDELAQIARERDILAHDNDNLQEQFAKAKQENQALSKKLNDTHNELNDIKQKVQDTNLEVNKLKNILKSEESENRQMMEQLRKANEDAENWENKARQSEADNNTLKLELITAEAEGNRLKEKVDSLNREVEQHLNAERSYKSQISTLHKSVVKMEEELQKVQFEKVSALADLSSTRELCIKLDSSKELLNRQLVAKDQEIEMRENELDSAHSEIELLRSQMANERISMQNLEALLVANRDKEYQSQIALQEKESEIQLLKEHLCLAENKMAIQSRDVAQFRNVVTQLEADLDITKRQLGTERFERERAVQELRRQNYSSNAYHMSSTMKPNTKCHSPERAHHRSPDRGLDRSLEENLCYRDF

SEQ ID NO: 712 - protein, 155 aa, Homo sapiens
MKVASGSTATAAAGPSCALKAGKTASGAGEVVRCLSEQSVAISRCAGGAGARLPALLDEQQVNVLLYDMNGCYSRLKELVPTLPQNRKVSKVEILQHVIDYIRDLQLELNSESEVGTPGGRGLPVRAPLSTLNGEISALTAEAACVPADDRILCR

SEQ ID NO: 713 - protein, 415 aa, Homo sapiens
MPTTIEREFEELDTQRRWQPLYLEIRNESHDYPHRVAKFPENRNRNRYRDVSPYDHSRVKLQNAENDYINASLVDIEEAQRSYILTQGPLPNTCCHFWLMVWQQKTKAVVMLNRIVEKESVKCAQYWPTDDQEMLFKETGFSVKLLSEDVKSYYTVHLLQLENINSGETRTISHFHYTTWPDFGVPESPASFLNFLFKVRESGSLNPDHGPAVIHCSAGIGRSGTFSLVDTCLVLMEKGDDINIKQVLLNMRKYRMGLIQTPDQLRFSYMAIIEGAKCIKGDSSIQKRWKELSKEDLSPAFDHSPNKIMTEKYNGNRIGLEEEKLTGDRCTGLSSKMQDTMEENSESALRKRIREDRKATTAQKVQQMKQRLNENERKRKRWLYWQPILTKMGFMSVILVGAFVGWRLFFQQNAL

SEQ ID NO: 714 - protein, 80 aa, Homo sapiens
MGRAMVARLGLGLLLLALLLPTQIYSSETTTGTSSNSSQSTSNSGLAPNPTNATTKAAGGALQSTASLFVVSLSLLHLYS

SEQ ID NO: 715 - protein, 903 aa, Homo sapiens
MPEQFSVAEFLAVTAEDLSSPAGAAAFAAKMPRYRGAALAREEILEGDQAILQRIKKAVRAIHSSGLGHVENEEQYREAVESLGNSHLSQNSHELSTGFLNLAVFTREVAALFKNLIQNLNNIVSFPLDSLMKGQLRDGRQDSKKQLEKAWKDYEAKMAKLEKERDRARVTGGIPGEVAQDMQRERRIFQLHMCEYLLKAGESQMKQGPDFLQSLIKFFHAQHNFFQDGWKAAQSLFPFIEKLAASVHALHQAQEDELQKLTQLRDSLRGTLQLESREEHLSRKNSGCGYSIHQHQGNKQFGTEKVGFLYKKSDGIRRVWQKRKCGVKYGCLTISHSTINRPPVKLTLLTCQVRPNPEEKKCFDLVTHNRTYHFQAEDEHECEAWVSVLQNSKDEALSSAFLGEPSAGPGSWGSAGHDGEPHDLTKLLIAEVKSRPGNSQCCDCGAADPTWLSTNLGVLTCIQCSGVHRELGVRFSRMQSLTLDLLGPSELLLALNMGNTSFNEVMEAQLPSHGGPKPSAESDMGTRRDYIMAKYVEHRFARRCTPEPQRLWTAICNRDLLSVLEAFANGQDFGQPLPGPDAQAPEELVLHLAVKVANQASLPLVDFIIQNGGHLDAKAADGNTALHYAALYNQPDCLKLLLKGRALVGTVNEAGETALDIARKKHHKECEELLEQAQAGTFAFPLHVDYSWVISTEPGSDSEEDEEEKRCLLKLPAQAHWASGRLDISNKTYETVASLGAATPQGESEDCPPPLPVKNSSRTLVQGCARHASGDRSEVSSLSSEAPETPESLGSPASSSSLMSPLEPGDPSQAPPNSEEGLREPPGTSRPSLTSGTTPSEMYLPVRFSSESTRSYRRGARSPEDGPSARQPLPRRNVPVGITEGDGSRTGSLPASSVQLLQD

SEQ ID NO: 716 - protein, 590 aa, Homo sapiens
MEVIHGRPYCCRELEGADILSNTFYSNELHNPLQTVTRPTASEDRYQELRESLQQCRLPWGAEREYGGIIPISLPEDHRPKYEPPRVMGKGHQHYGFGGETWPRKLPVEQFYYLTQNKKSDVYGNDSLIPKPPNSTVGEICLPYPIEHPYHTHICRGAMFPTFTSPEDLYTGIKARTQQPFPPTVPTKAYDSTVLKTRGNPYRYELIDIPMDSKKKALTWPGQGVYYDFPRGVEKNKPVFYPKPPKTFAPNTSLNSWDPICSAKEANIQRNLERSHWLTSYTHDFTGLGPMDPLELDDYHEKMVAELTRKIGFDPEPQEKFHPVFKPPRPLEGRIARLIQNRRSLEAIVQQRPRSCPDCTPRVLCNFHTFVPSSKEMVALSDNIPAGVTHKNQDIEEKIIEEQSLLSTYELPSCYPTKDLTSIYDIKPFPKITDTKKTEDLYWRQQSLKTQPTPYCKPDHWIHYENLKSPLRDQYNMCPDPVSLSKPSVLQNKQDTEAFTLEHFLSKPEEELFLNMENNEETRPVLGWIPRAGVTKPQTNLLELKNSFSKTGAQKRFHKSILEDHKDLRDNEHSGMKHQFYGHNSYYFYN

SEQ ID NO: 717 - protein, 517 aa, Homo sapiens
MLRAAARFGPRLGRRLLSAAATQAVPAPNQQPEVFCNQIFINNEWHDAVSRKTFPTVNPSTGEVICQVAEGDKEDVDKAVKAARAAFQLGSPWRRMDASHRGRLLNRLADLIERDRTYLAALETLDNGKPYVISYLVDLDMVLKCLRYYAGWADKYHGKTIPIDGDFFSYTRHEPVGVCGQIIPWNFPLLMQAWKLGPALATGNVVVMKVAEQTPLTALYVANLIKEAGFPPGVVNIVPGFGPTAGAAIASHEDVDKVAFTGSTEIGRVIQVAAGSSNLKRVTLELGGKSPNIIMSDADMDWAVEQAHFALFFNQGQCCCAGSRTFVQEDIYDEFVERSVARAKSRVVGNPFDSKTEQGPQVDETQFKKILGYINTGKQEGAKLLCGGGIAADRGYFIQPTVFGDVQDGMTIAKEEIFGPVMQILKFKTIEEVVGRANNSTYGLAAAVFTKDLDKANYLSQALQAGTVWVNCYDVFGAQSPFGGYKMSGSGRELGEYGLQAYTEVKTVTVKVPQKNS

SEQ ID NO: 718 - protein, 758 aa, Homo sapiens
MLRACQLSGVTAAAQSCLCGKFVLRPLRPCRRYSTSGSSGLTTGKIAGAGLLFVGGGIGGTILYAKWDSHFRESVEKTIPYSDKLFEMVLGPAAYNVPLPKKSIQSGPLKISSVSEVMKESKQSASQLQKQKGDTPASATAPTEAAQIISAAGDTLSVPAPAVQPEESLKTDHPEIGEGKPTPALSEEASSSSIRERPPEEVAARLAQQEKQEQVKIESLAKSLEDALRQTASVTLQAIAAQNAAVQAVNAHSNILKAAMDNSEIAGEKKSAQWRTVEGALKERRKAVDEAADALLKAKEELEKMKSVIENAKKKEVAGAKPHITAAEGKLHNMIVDLDNVVKKVQAAQSEAKVVSQYHELVVQARDDFKRELDSITPEVLPGWKGMSVSDLADKLSTDDLNSLIAHAHRRIDQLNRELAEQKATEKQHITLALEKQKLEEKRAFDSAVAKALEHHRSEIQAEQDRKIEEVRDAMENEMRTQLRRQAAAHTDHLRDVLRVQEQELKSEFEQNLSEKLSEQELQFRRLSQEQVDNFTLDINTAYARLRGIEQAVQSHAVAEEEARKAHQLWLSVEALKYSMKTSSAETPTIPLGSAVEAIKANCSDNEFTQALTAAIPPESLTRGVYSEETLRARFYAVQKLARRVAMIDETRNSLYQYFLSYLQSLLLFPPQQLKPPPELCPEDINTFKLLSYASYCIEHGDLELAAKFVNQLKGESRRVAQDWLKEARMTLETKQIVEILTAYASAVGIGTTQVQPE

SEQ ID NO: 719 - protein, 803 aa, Homo sapiens
MIPVTEFRQFSEQQPAFRVLKPWWDVFTDYLSVAMLMIGVFGCTLQVMQDKIICLPKRVQPAQNHSSLSNVSQAVASTTPLPPPKPSPANPITVEMKGLKTDLDLQQYSFINQMCYERALHWYAKYFPYLVLIHTLVFMLCSNFWFKFPGSSSKIEHFISILGKCFDSPWTTRALSEVSGEDSEEKDNRKNNMNRSNTIQSGPEGSLVNSQSLKSIPEKFVVDKSTAGALDKKEGEQAKALFEKVKKFRLHVEEGDILYAMYVRQTVLKVIKFLIIIAYNSALVSKVQFTVDCNVDIQDMTGYKNFSCNHTMAHLFSKLSFCYLCFVSIYGLTCLYTLYWLFYRSLREYSFEYVRQETGIDDIPDVKNDFAFMLHMIDQYDPLYSKRFAVFLSEVSENKLKQLNLNNEWTPDKLRQKLQTNAHNRLELPLIMLSGLPDTVFEITELQSLKLEIIKNVMIPATIAQLDNLQELSLHQCSVKIHSAALSFLKENLKVLSVKFDDMRELPPWMYGLRNLEELYLVGSLSHDISRNVTLESLRDLKSLKILSIKSNVSKIPQAVVDVSSHLQKMCIHNDGTKLVMLNNLKKMTNLTELELVHCDLERIPHAVFSLLSLQELDLKENNLKSIEEIVSFQHLRKLTVLKLWHNSITYIPEHIKKLTSLERLSFSHNKIEVLPSHLFLCNKIRYLDLSYNDIRFIPPEIGVLQSLQYFSITCNKVESLPDELYFCKKLKTLKIGKNSLSVLSPKIGNLLFLSYLDVKGNHFEILPPELGDCRALKRAGLVVEDALFETLPSDVREQMKTE

SEQ ID NO: 720 - protein, 547 aa, Homo sapiens
MYRLMSAVTARAAAPGGLASSCGRRGVHQRAGLPPLGHGWVGGLGLGLGLALGVKLAGGLRGAAPAQSPAAPDPEASPLAEPPQEQSLAPWSPQTPAPPCSRCFARAIESSRDLLHRIKDEVGAPGIVVGVSVDGKEVWSEGLGYADVENRVPCKPETVMRIASISKSLTMVALAKLWEAGKLDLDIPVQHYVPEFPEKEYEGEKVSVTTRLLISHLSGIRHYEKDIKKVKEEKAYKALKMMKENVAFEQEKEGKSNEKNDFTKFKTEQENEAKCRNSKPGKKKNDFEQGELYLREKFENSIESLRLFKNDPLFFKPGSQFLYSTFGYTLLAAIVERASGCKYLDYMQKIFHDLDMLTTVQEENEPVIYNRARFYVYNKKKRLVNTPYVDNSYKWAGGGFLSTVGDLLKFGNAMLYGYQVGLFKNSNENLLPGYLKPETMVMMWTPVPNTEMSWDKEGKYAMAWGVVERKQTYGSCRKQRHYASHTGGAVGASSVLLVLPEELDTETINNKVPPRGIIVSIICNMQSVGLNSTALKIALEFDKDRSD

SEQ ID NO: 721 - protein, 433 aa, Homo sapiens
MVWKVAVFLSVALGIGAVPIDDPEDGGKHWVVIVAGSNGWYNYRHQADACHAYQIIHRNGIPDEQIVVMMYDDIAYSEDNPTPGIVINRPNGTDVYQGVPKDYTGEDVTPQNFLAVLRGDAEAVKGIGSGKVLKSGPQDHVFIYFTDHGSTGILVFPNEDLHVKDLNETIHYMYKHKMYRKMVFYIEACESGSMMNHLPDNINVYATTAANPRESSYACYYDEKRSTYLGDWYSVNWMEDSDVEDLTKETLHKQYHLVKSHTNTSHVMQYGNKTISTMKVMQFQGMKRKASSPVPLPPVTHLDLTPSPDVPLTIMKRKLMNTNDLEESRQLTEEIQRHLDARHLIEKSVRKIVSLLAASEAEVEQLLSERAPLTGHSCYPEALLHFRTHCFNWHSPTYEYALRHLYVLVNLCEKPYPLHRIKLSMDHVCLGHY

SEQ ID NO: 722 - protein, 529 aa, Homo sapiens
MTSSRLWFSLLLAAAFAGRATALWPWPQNFQTSDQRYVLYPNNFQFQYDVSSAAQPGCSVLDEAFQRYRDLLFGSGSWPRPYLTGKRHTLEKNVLVVSVVTPGCNQLPTLESVENYTLTINDDQCLLLSETVWGALRGLETFSQLVWKSAEGTFFINKTEIEDFPRFPHRGLLLDTSRHYLPLSSILDTLDVMAYNKLNVFHWHLVDDPSFPYESFTFPELMRKGSYNPVTHIYTAQDVKEVIEYARLRGIRVLAEFDTPGHTLSWGPGIPGLLTPCYSGSEPSGTFGPVNPSLNNTYEFMSTFFLEVSSVFPDFYLHLGGDEVDFTCWKSNPEIQDFMRKKGFGEDFKQLESFYIQTLLDIVSSYGKGYVVWQEVFDNKVKIQPDTIIQVWREDIPVNYMKELELVTKAGFRALLSAPWYLNRISYGPDWKDFYVVEPLAFEGTPEQKALVIGGEACMWGEYVDNTNLVPRLWPRAGAVAERLWSNKLTSDLTFAYERLSHFRCELLRRGVQAQPLNVGFCEQEFEQT

SEQ ID NO: 723 - protein, 1116 aa, Homo sapiens
MAADLNLEWISLPRSWTYGITRGGRVFFINEEAKSTTWLHPVTGEAVVTGHRRQSTDLPTGWEEAYTFEGARYYINHNERKVTCKHPVTGQPSQDNCIFVVNEQTVATMTSEEKKERPISMINEASNYNVTSDYAVHPMSPVGRTSRASKKVHNFGKRSNSIKRNPNAPVVRRGWLYKQDSTGMKLWKKRWFVLSDLCLFYYRDEKEEGILGSILLPSFQIALLTSEDHINRKYAFKAAHPNMRTYYFCTDTGKEMELWMKAMLDAALVQTEPVKRVDKITSENAPTKETNNIPNHRVLIKPEIQNNQKNKEMSKIEEKKALEAEKYGFQKDGQDRPLTKINSVKLNSLPSEYESGSACPAQTVHYRPINLSSSENKIVNVSLADLRGGNRPNTGPLYTEADRVIQRTNSMQQLEQWIKIQKGRGHEEETRGVISYQTLPRNMPSHRAQIMARYPEGYRTLPRNSKTRPESICSVTPSTHDKTLGPGAEEKRRSMRDDTMWQLYEWQQRQFYNKQSTLPRHSTLSSPKTMVNISDQTMHSIPTSPSHGSIAAYQGYSPQRTYRSEVSSPIQRGDVTIDRRHRAHHPKHVYVPDRRSVPAGLTLQSVSPQSLQGKTLSQDEGRGTLYKYRPEEVDIDAKLSRLCEQDKVVHALEEKLQQLHKEKYTLEQALLSASQEIEMHADNPAAIQTVVLQRDDLQNGLLSTCRELSRATAELERAWREYDKLEYDVTVTRNQMQEQLDHLGEVQTESAGIQRAQIQKELWRIQDVMEGLSKHKQQRGTTEIGMIGSKPFSTVKYKNEGPDYRLYKSEPELTTVAEVDESNGEEKSEPVSEIETSVVKGSHFPVGVVPPRAKSPTPESSTIASYVTLRKTKKMMDLRTERPRSAVEQLCLAESTRPRMTVEEQMERIRRHQQACLREKKKGLNVIGASDQSPLQSPSNLRDNPFRTTQTRRRDDKELDTAIRENDVKPDHETPATEIVQLKETEPQNVDFSKELKKTENISYEMLFEPEPNGVNSVEMMDKERNKDKMPEDVTFSPQDETQTANHKPEEHPEENTKNSVDEQEETVISYESTPEVSRGNQTMAVKSLSPSPESSASPVPSTQPQLTEGSHFMCV

SEQ ID NO: 724 - protein, 448 aa, Homo sapiens
MLWLALGPFPAMENQVLVIRIKIPNSGAVDWTVHSGPQLLFRDVLDVIGQVLPEATTTAFEYEDEDGDRITVRSDEEMKAMLSYYYSTVMEQQVNGQLIEPLQIFPRACKPPGERNIHGLKVNTRAGPSQHSSPAVSDSLPSNSLKKSSAELKKILANGQMNEQDIRYRDTLGHGNGGTVYKAYHVPSGKILAVKVILLDITLELQKQIMSELEILYKCDSSYIIGFYGAFFVENRISICTEFMDGGSLDVYRKMPEHVLGRIAVAVVKGLTYLWSLKILHRDVKPSNMLVNTRGQVKLCDFGVSTQLVNSIAKTYVGTNAYMAPERISGEQYGIHSDVWSLGISFMELALGRFPYPQIQKNQGSLMPLQLLQCIVDEDSPVLPVGEFSEPFVHFITQCMRKQPKERPAPEELMGHPFIVQFNDGNAAVVSMWVCRALEERRSQQGPP

SEQ ID NO: 725 - protein, 138 aa, Homo sapiens
MGATAVLEMAAATPPARKSLAKDTAASVMLKEEADCCRTGLGREPALTPALRGGAKQMADLYRGSRSWSGRRRRRGRGGVWAPARWAAEPLSGPARRRRSRGGRAGTALRAARARPRHLTRREEGAGPENTRDLNAGP

SEQ ID NO: 726 - protein, 1214 aa, Homo sapiens
MGVDFDVKTFCHNLRATKPPYECPVETCRKVYKSYSGIEYHLYHYDHDNPPPPQQTPLRKHKKKGRQSRPANKQSPSPSEVSQSPGREVMSYAQAQRMVEVDLHGRVHRISIFDNLDVVSEDEEAPEEAPENGSNKENTETPAATPKSGKHKNKEKRKDSNHHHHHNVSASTTPKLPEVVYRELEQDTPDAPPRPTSYYRYIEKSAEELDEEVEYDMDEEDYIWLDIMNERRKTEGVSPIPQEIFEYLMDRLEKESYFESHNKGDPNALVDEDAVCCICNDGECQNSNVILFCDMCNLAVHQECYGVPYIPEGQWLCRRCLQSPSRAVDCALCPNKGGAFKQTDDGRWAHVVCALWIPEVCFANTVFLEPIDSIEHIPPARWKLTCYICKQRGSGACIQCHKANCYTAFHVTCAQQAGLYMKMEPVRETGANGTSFSVRKTAYCDIHTPPGSARRLPALSHSEGEEDEDEEEDEGKGWSSEKVKKAKAKSRIKMKKARKILAEKRAAAPVVSVPCIPPHRLSKITNRLTIQRKSQFMQRLHSYWTLKRQSRNGVPLLRRLQTHLQSQRNCDQVGRDSEDKNWALKEQLKSWQRLRHDLERARLLVELIRKREKLKRETIKVQQIAMEMQLTPFLILLRKTLEQLQEKDTGNIFSEPVPLSEVPDYLDHIKKPMDFFTMKQNLEAYRYLNFDDFEEDFNLIVSNCLKYNAKDTIFYRAAVRLREQGGAVLRQARRQAEKMGIDFETGMHIPHSLAGDEATHHTEDAAEEERLVLLENQKHLPVEEQLKLLLERLDEVNASKQSVGRSRRAKMIKKEMTALRRKLAHQRETGRDGPERHGPSSRGSLTPHPAACDKDGQTDSAAEESSSQETSKGLGPNMSSTPAHEVGRRTSVLFSKKNPKTAGPPKRPGRPPKNRESQMTPSHGGSPVGPPQLPIMSSLRQRKRGRSPRPSSSSDSDSDKSTEDPPMDLPANGFSGGNQPVKKSFLVYRNDCSLPRSSSDSESSSSSSSSAASDRTSTTPSKQGRGKPSFSRGTFPEDSSEDTSGTENEAYSVGTGRGVGHSMVRKSLGRGAGWLSEDEDSPLDALDLVWAKCRGYPSYPALIIDPKMPREGMFHHGVPIPVPPLEVLKLGEQMTQEAREHLYLVLFFDNKRTWQWLPRTKLVPLGVNQDLDKEKMLEGRKSNIRKSVQIAYHRALQHRSKVQGEQSSETSDSD

SEQ ID NO: 727 - protein, 523 aa, Homo sapiens
MVPPRRHRGAGRPGVLSSSPPFRLRSAKFSGIALEDLRRALKTRLQMVCVFVMNRMNSQNSGFTQRRRMALGIVILLLVDVIWVASSELTSYVFTQYNKPFFSTFAKTSMFVLYLLGFIIWKPWRQQCTRGLRGKHAAFFADAEGYFAACTTDTTMNSSLSEPLYVPVKFHDLPSEKPESTNIDTEKTPKKSRVRFSNIMEIRQLPSSHALEAKLSRMSYPVKEQESILKTVGKLTATQVAKISFFFCFVWFLANLSYQEALSDTQVAIVNILSSTSGLFTLILAAVFPSNSGDRFTLSKLLAVILSIGGVVLVNLAGSEKPAGRDTVGSIWSLAGAMLYAVYIVMIKRKVDREDKLDIPMFFGFVGLFNLLLLWPGFFLLHYTGFEDFEFPNKVVLMCIIINGLIGTVLSEFLWLWGCFLTSSLIGTLALSLTIPLSIIADMCMQKVQFSWLFFAGAIPVFFSFFIVTLLCHYNNWDPVMVGIRRIFAFICRKHRIQRVPEDSEQCESLISMHSVSQEDGAS

SEQ ID NO: 728 - protein, 917 aa, Homo sapiens
MEGAGENAPESSSSAPGSEESARDPQVPPPEEESGDCARSLEAVPKKLCGYLSKFGGKGPIRGWKSRWFFYDERKCQLYYSRTAQDANPLDSIDLSSAVFDCKADAEEGIFEIKTPSRVITLKAATKQAMLYWLQQLQMKRWEFHNSPPAPPATPDAALAGNGPVLHLELGQEEAELEEFLCPVKTPPGLVGVAAALQPFPALQNISLKHLGTEIQNTMHNIRGNKQAQGTGHEPPGEDSPQSGEPQREEQPLASDASTPGREPEDSPKPAPKPSLTISFAQKAKRQNNTFPFFSEGITRNRTAQEKVAALEQQVLMLTKELKSQKELVKILHKALEAAQQEKRASSAYLAAAEDKDRLELVRHKVRQIAELGRRVEALEQERESLAHTASLREQQVQELQQHVQLLMDKNHAKQQVICKLSEKVTQDFTHPPDQSPLRPDAANRDFLSQQGKIEHLKDDMEAYRTQNCFLNFEIHQVTKIWRKVAEKEKALLTKCAYLQARNCQVESKYLAGLRRLQEALGDEASECSELLRQLVQEALQWEAGEASSDSIELSPISKYDEYGFLTVPDYEVEDLKLLAKIQALESRSHHLLGLEAVDRPLRERWAALGDLVPSAELKQLLRAGVPREHRPRVWRWLVHLRVQHLHTPGCYQELLSRGQAREHPAARQIELDLNRTFPNNKHFTCPTSSFPDKLRRVLLAFSWQNPTIGYCQGLNRLAAIALLVLEEEESAFWCLVAIVETIMPADYYCNTLTASQVDQRVLQDLLSEKLPRLMAHLGQHHVDLSLVTFNWFLVVFADSLISNILLRVWDAFLYEGTKYNEKEILRLQNGLEIYQYLRFFTKTISNSRKLMNIAFNDMNPFRMKQLRQLRMVHRERLEAELRELEQLKAEYLERRASRRRAVSEGCASEDEVEGEA

SEQ ID NO: 729 - protein, 562 aa, Homo sapiens
MSNQYQEEGCSERPECKSKSPTLLSSYCIDSILGRRSPCKMRLLGAAQSLPAPLTSRADPEKAVQGSPKSSSAPFEAELHLPPKLRRLYGPGGGRLLQGAAAAAAAAAAAAAAAATATAGPRGEAPPPPPPTARPGERPDGAGAAAAAAAAAAAAWDTLKISQAPQVSISRSKSYRENGAPFVPPPPALDELGGPGGVTHPEERLGVAGGPGSAPAAGGGTGTEDDEEELLEDEEDEDEEEELLEDDEEELLEDDARALLKEPRRCPVAATGAVAAAAAAAVATEGGELSPKEELLLHPEDAEGKDGEDSVCLSAGSDSEEGLLKRKQRRYRTTFTSYQLEELERAFQKTHYPDVFTREELAMRLDLTEARVQVWFQNRRAKWRKREKAGAQTHPPGLPFPGPLSATHPLSPYLDASPFPPHHPALDSAWTAAAAAAAAAFPSLPPPPGSASLPPSGAPLGLSTFLGAAVFRHPAFISPAFGRLFSTMAPLTSASTAAALLRQPTPAVEGAVASGALADPATAAADRRASSIAALRLKAKEHAAQLTQLNILPGTSTGKEVC

SEQ ID NO: 730 - protein, 179 aa, Homo sapiens
MTDLVAVWDVALSDGVHKIEFEHGTTSGKRVVYVDGKEEIRKEWMFKLVGKETFYVGAAKTKATINIDAISGFAYEYTLEINGKSLKKYMEDRSKTTNTWVLHMDGENFRIVLEKDAMDVWCNGKKLETAGEFVDDGTETHFSIGNHDCYIKAVSSGKRKEGIIHTLIVDNREIPEIAS

SEQ ID NO: 731 - protein, 333 aa, Homo sapiens
MACSRPPSQCEPTSLPPGPPAGRRHLPLSRRRREMSSNKEQRSAVFVILFALITILILYSSNSANEVFHYGSLRGRSRRPVNLKKWSITDGYVPILGNKTLPSRCHQCVIVSSSSHLLGTKLGPEIERAECTIRMNDAPTTGYSADVGNKTTYRVVAHSSVFRVLRRPQEFVNRTPETVFIFWGPPSKMQKPQGSLVRVIQRAGLVFPNMEAYAVSPGRMRQFDDLFRGETGKDREKSHSWLSTGWFTMVIAVELCDHVHVYGMVPPNYCSQRPRLQRMPYHYYEPKGPDECVTYIQNEHSRKGNHHRFITEKRVFSSWAQLYGITFSHPSWT

SEQ ID NO: 732 - protein, 325 aa, Homo sapiens
MATPLPPPSPRHLRLLRLLLSGLVLGAALRGAAAGHPDVAACPGSLDCALKRRARCPPGAHACGPCLQPFQEDQQGLCVPRMRRPPGGGRPQPRLEDEIDFLAQELARKESGHSTPPLPKDRQRLPEPATLGFSARGQGLELGLPSTPGTPTPTPHTSMGSPVSSDPVHMSPLEPRGGQGDGLALVLILAFCVAGAAALSVASLCWCRLHREIRLTQKADYATAKAPGSPAAPRISPGDQRLAQSAEMYHYQHQRQQMLCLERHKEPPKELDTASSDEENEDGDFTVYECPGLAPTGEMEVRNPLFDHAALSAPLPAPSSPPALP

SEQ ID NO: 733 - protein, 76 aa, Homo sapiens
MVCIPCIVIPVLLWIYKKFLEPYIYPLVSPFVSRIWPKKAIQESNDTNKGKVNFKGADMNGLPTKGPTEICDKKKD

SEQ ID NO: 734 - protein, 211 aa, Homo sapiens
MSETDHIASTSSDKNVGKTPELKEDSCNLFSGNESSKLENESKLLSLNTDKTLCQPNEHNNRIEAQENYIPDHGGGEDSCAKTDTGSENSEQIANFPSGNFAKHISKTNETEQKVTQILVELRSSTFPESANEKTYSESPYDTDCTKKFISKIKSVSASEDLLEEIESELLSTEFAEHRVPNGMNKGEHALVLFEKCVQDKYLQQEHIIKK

SEQ ID NO: 735 - protein, 460 aa, Homo sapiens
MAPGRAVAGLLLLAAAGLGGVAEGPGLAFSEDVLSVFGANLSLSAAQLQHLLEQMGAASRVGVPEPGQLHFNQCLTAEEIFSLHGFSNATQITSSKFSVICPAVLQQLNFHPCEDRPKHKTRPSHSEVWGYGFLSVTIINLASLLGLILTPLIKKSYFPKILTFFVGLAIGTLFSNAIFQLIPEAFGFDPKVDSYVEKAVAVFGGFYLLFFFERMLKMLLKTYGQNGHTHFGNDNFGPQEKTHQPKALPAINGVTCYANPAVTEANGHIHFDNVSVVSLQDGKKEPSSCTCLKGPKLSEIGTIAWMITLCDALHNFIDGLAIGASCTLSLLQGLSTSIAILCEEFPHELGDFVILLNAGMSTRQALLFNFLSACSCYVGLAFGILVGNNFAPNIIFALAGGMFLYISLADMFPEMNDMLREKVTGRKTDFTFFMIQNAGMLTGFTAILLITLYAGEIELE

SEQ ID NO: 736 - protein, 559 aa, Homo sapiens
MAASEDGSGCLVSRGRSQSDPSVLTDSSATSSADAGENPDEMDQTPPARPEYLVSGIRTPPVRRNSKLATLGRIFKPWKWRKKKNEKLKQTTSALEKKMAGRQGREELIKKGLLEMMEQDAESKTCNPDGGPRSVQSEPPTPKSETLTSEDAQPGSPLATGTDQVSLDKPLSSAAHLDDAAKMPSASSGEEADAGSLLPTTNELSQALAGADSLDSPPRPLERSVGQLPSPPLLPTPPPKASSKTTKNVTGQATLFQASSMKSADPSLRGQLSTPTGSPHLTTVHRPLPPSRVIEELHRALATKHRQDSFQGRESKGSPKKRLDVRLSRTSSVERGKEREEAWSFDGALENKRTAAKESEENKENLIINSELKDDLLLYQDEEALNDSIISGTLPRKCKKELLAVKLRNRPSKQELEDRNIFPRRTDEERQEIRQQIEMKLSKRLSQRPAVEELERRNILKQRNDQTEQEERREIKQRLTRKLNQRPTVDELRDRKILIRFSDYVEVAKAQDYDRRADKPWTRLSAADKAAIRKELNEYKSNEMEVHASSKHLTRFHRP

SEQ ID NO: 737 - protein, 219 aa, Homo sapiens; identical to SEQ ID NO: 545

SEQ ID NO: 738 - protein, 414 aa, Homo sapiens
MAMVVSTWRDPQDEVPGSQGSQASQAPPVPGPPPGAPHTPQTPGQGGPASTPAQTAAGGQGGPGGPGSDKQQQQQHIECVVCGDKSSGKHYGQFTCEGCKSFFKRSVRRNLSYTCRANRNCPIDQHHRNQCQYCRLKKCLKVGMRREAVQRGRMPPTQPTHGQFALTNGDPLNCHSYLSGYISLLLRAEPYPTSRFGSQCMQPNNIMGIENICELAARMLFSAVEWARNIPFFPDLQITDQVALLRLTWSELFVLNAAQCSMPLHVAPLLAAAGLHASPMSADRVVAFMDHIRIFQEQVEKLKALHVDSAEYSCLKAIVLFTSDACGLSDVAHVESLQEKSQCALEEYVRSQYPNQPTRFGKLLLRLPSLRTVSSSVIEQLFFVRLVGKTPIETLIRDMLLSGSSFNWPYMAIQ

SEQ ID NO: 739 - protein, 963 aa, Homo sapiens [sequence omitted]

SEQ ID NO: 740 - protein, 268 aa, Homo sapiens
MFLVNSFLKGGGGGGGGGGGLGGGLGNVLGGLISGAGGGGGGGGGGGGGGGGGGGGTAMRILGGVISAISEAAAQYNPEPPPPRTHYSNIEANESEEVRQFRRLFAQLAGDDMEVSATELMNILNKVVTRHPDLKTDGFGIDTCRSMVAVMDSDTTGKLGFEEFKYLWNNIKRWQAIYKQFDTDRSGTICSSELPGAFEAAGFHLNEHLYNMIIRRYSDESGNMDFDNFISCLVRLDAMFRAFKSLDKDGTGQIQVNIQEWLQLTMYS

SEQ ID NO: 741 - protein, 317 aa, Homo sapiens
ENTGADRLMTQRCKDRLNSLAISVMNQWPGVKLRVTEGWDEDGHHSEESLHYEGRAVDITTSDRDRNKYGLLARLAVEAGFDWVYYESKAHVHCSVKSEHSAAAKTGGCFPAGAQVRLESGARVALSAVRPGDRVLAMGEDGSPTFSDVLIFLDREPHRLRAFQVIETQDPPRRLALTPAHLLFTADNHTEPAARFRATFASHVQPGQYVLVAGVPGLQPARVAAVSTHVALGAYAPLTKHGTLVVEDVVASCFAAVADHHLAQLAFWPLRLFHSLAWGSWTPGEGVHWYPQLLYRLGRLLLEEGSFHPLGMSGAGS

SEQ ID NO: 742 - protein, 225 aa, Homo sapiens; identical to SEQ ID NO: 563

SEQ ID NO: 743 - protein, 221 aa, Homo sapiens
MAAVGPRTGPGTGAEALALAAELQGEATCSICLELFREPVSVECGHSFCRACIGRCWERPGAGSVGAATRAPPFPLPCPQCREPARPSQLRPNRQLAAVATLLRRFSLPAAAPGEHGSQAAAARAAAARCGQHGEPFKLYCQDDGRAICVVCDRAREHREHAVLPLDEAVQEAKELLESRLRVLKKELEDCEVFRSTEKKESKELLVSQAPAGPPWDITEA

SEQ ID NO: 744 - protein, 125 aa, Homo sapiens
MAVADLALIPDVDIDSDGVFKYVLIRVHSAPRSGAPAAESKEIVRGYKWAEYHADIYDKVSGDMQKQGCDCECLGGGRISHQSQDKKIHVYGYSMAYGPAQHAISTEKIKAKYPDYEVTWANDGY

SEQ ID NO: 745 - protein, 462 aa, Homo sapiens
MGKEKTHINIVVIGHVDSGKSTTTGHLIYKCGGIDKRTIEKFEKEAAEMGKGSFKYAWVLDKLKAERERGITIDISLWKFETSKYYVTIIDAPGHRDFIKNMITGTSQADCAVLIVAAGVGEFEAGISKNGQTREHALLAYTLGVKQLIVGVNKMDSTEPPYSQKRYEEIVKEVSTYIKKIGYNPDTVAFVPISGWNGDNMLEPSANMPWFKGWKVTRKDGNASGTTLLEALDCILPPTRPTDKPLRLPLQDVYKIGGIGTVPVGRVETGVLKPGMVVTFAPVNVTTEVKSVEMHHEALSEALPGDNVGFNVKNVSVKDVRRGNVAGDSKNDPPMEAAGFTAQVIILNHPGQISAGYAPVLDCHTAHIACKFAELKEKIDRRSGKKLEDGPKFLKSGDAAIVDMVPGKPMCVESFSDYPPLGRFAVRDMRQTVAVGVIKAVDKKAAGAGKVTKSAQKAQKAK

SEQ ID NO: 746 - protein, 1591 aa, Homo sapiens
MSLLCVRVKRAKFQGSPDKFNTYVTLKVQNVKSTTVAVRGDQPSWEQDFMFEISRLDLGLSVEVWNKGLIWDTMVGTVWIALKTIRQSDEEGPGEWSTLEAETLMKDDEICGTRNPTPHKILLDTRFELPFDIPEEEARYWTYKWEQINALGADNEYSSQEESQRKPLPTAAAQCSFEDPDSAVDDRDSDYRSETSNSFPPPYHTASQPNASVHQFPVPVRSPQQLLLQGSSRDSCNDSMQSYDLDYPERRAISPTSSSRYGSSCNVSQGSSQLSELDQYHEQDDDHRETDSIHSCHSSHSLSRDGQAGFGEQEKPLEVTGQAEKEAACEPKEMKEDATTHPPPDLVLQKDHFLGPQESFPEENASSPFTQARAHWIRAVTKVRLQLQEIPDDGDPSLPQWLPEGPAGGLYGIDSMPDLRRKKPLPLVSDLSLVQSRKAGITSAMATRTSLKDEELKSHVYKKTLQALIYPISCTTPHNFEVWTATTPTYCYECEGLLWGIARQGMRCSECGVKCHEKCQDLLNADCLQRAAEKSCKHGAEDRTQNIIMAMKDRMKIRERNKPEIFEVIRDVFTVNKAAHVQQMKTVKQSVLDGTSKWSAKITITVVCAQGLQAKDKTGSSDPYVTVQVSKTKKRTKTIFGNLNPVWEEKFHFECHNSSDRIKVRVWDEDDDIKSRVKQRLKRESDDFLGQTIIEVRTLSGEMDVWYNLEKRTDKSAVSGAIRLQISVEIKGEEKVAPYHVQYTCLHENLFHYLTDIQGSGGVRIPEARGDDAWKVYFDETAQEIVDEFAMRYGIESIYQAMTHFACLSSKYMCPGVPAVMSTLLANINAYYAHTTASTNVSASDRFAASNFGKERFVKLLDQLHNSLRIDLSTYRNNFPAGSPERLQDLKSTVDLLTSITFFRMKVQELQSPPRASQVVKDCVKACLNSTYEYIFNNCHDLYSRQYQLKQELPPEEQGPSIRNLDFWPKLITLIVSIIEEDKNSYTPVLNQFPQELNVGKVSAEVMWHLFAQDMKYALEEHEKDHLCKSADYMNLHFKVKWLHNEYVRDLPVLQGQVPEYPAWFEQFVLQWLDENEDVSLEFLRGALERDKKDGFQQTSEHALFSCSVVDVFTQLNQSFEIIRKLECPDPSILAHYMRRFAKTIGKVLMQYADILSKDFPAYCTKEKLPCILMNNVQQLRVQLEKMFEAMGGKELDLEAADSLKELQVKLNTVLDELSMVFGNSFQVRIDECVRQMADILGQVRGTGNASPDARASAAQDADSVLRPLMDFLDGNLTLFATVCEKTVLKRVLKELWRVVMNTMERMIVLPPLTDQTGTQLIFTAAKELSHLSKLKDHMVREETRNLTPKQCAVLDLALDTIKQYFHAGGNGLKKTFLEKSPDLQSLRYALSLYTQTTDTLIKTFVRSQTTQGSGVDDPVGEVSIQVDLFTHPGTGEHKVTVKVVAANDLKWQTAGMFRPFVEVTMVGPHQSDKKRKFTTKSKSNNWAPKYNETFHLLLGNEEGPESYELQICVKDYCFAREDRVLGLAVMPLRDVTAKGSCACWCPLGRKIHMDETGLTILRILSQRSNDEVAREFVKLKSESRSTEEGS

SEQ ID NO: 747 - protein, 602 aa, Homo sapiens
MSRLKRIAGQDLRAGFKAGGRDCGTSVPQGLLKAARKSGQLNLSGRNLSEVPQCVWRINVDIPEEANQNLSFGATERWWEQTDLTKLIISNNKLQSLTDDLRLLPALTVLDIHDNQLTSLPSAIRELENLQKLNVSHNKLKILPEEITNLRNLKCLYLQHNELTCISEGFEQLSNLEDLDLSNNHLTTVPASFSSLSSLVRLNLSSNELKSLPAEINRMKRLKHLDCNSNLLETIPPELAGMESLELLYLRRNKLRFLPEFPSCSLLKELHVGENQIEMLEAEHLKHLNSILVLDLRDNKLKSVPDEIILLRSLERLDLSNNDISSLPYSLGNLHLKFLALEGNPLRTIRREIISKGTQEVLKYLRSKIKDDGPSQSESATETAMTLPSESRVNIHAIITLKILDYSDKQATLIPDEVFDAVKSNIVTSINFSKNQLCEIPKRMVELKEMVSDVDLSFNKLSFISLELCVLQKLTFLDLRNNFLNSLPEEMESLVRLQTINLSFNRFKMLPEVLYRIFTLETILISNNQVGSVDPQKMKMMENLTTLDLQNNDLLQIPPELGNCVNLRTLLLDGNPFRVPRAAILMKGTAAILEYLRDRIPT

SEQ ID NO: 748 - protein, 788 aa, Homo sapiens
MTYWLQELQQKRWEYCNSLDMVKWDSRTSPTPGDFPKGLVARDNTDLIYPHPNASAEKARNVLAVETVPGELVGEQAANQPAPGHPNSINFYSLKQWGNELKNSMSSFRPGRGHNDSRRTVFYTNEEWELLDPTPKDLEESIVQEEKKKLTPEGNKGVTGSGFPFDFGRNPYKGKRPLKDIIGSYKNRHSSGDPSSEGTSGSGSVSIRKPASEMQLQVQSQQEELEQLKKDLSSQKELVRLLQQTVRSSQYDKYFTSSRLCEGVPKDTLELLHQKDDQILGLTSQLERFSLEKESLQQEVRTLKSKVGELNEQLGMLMETIQAKDEVIIKLSEGEGNGPPPTVAPSSPSVVPVARDQLELDRLKDNLQGYKTQNKFLNKEILELSALRRNAERRERDLMAKYSSLEAKLCQIESKYLILLQEMKTPVCSEDQGPTREVIAQLLEDALQVESQEQPEQAFVKPHLVSEYDIYGFRTVPEDDEEEKLVAKVRALDLKTLYLTENQEVSTGVKWENYFASTVNREMMCSPELKNLIRAGIPHEHRSKVWKWCVDRHTRKFKDNTEPGHFQTLLQKALEKQNPASKQIELDLLRTLPNNKHYSCPTSEGIQKLRNVLLAFSWRNPDIGYCQGLNRLVAVALLYLEQEDAFWCLVTIVEVFMPRDYYTKTLLGSQVDQRVFRDLMSEKLPRLHGHFEQYKVDYTLITFNWFLVVFVDSVVSDILFKIWDSFLYEGPKVIFRFALALFKYKEEEILKLQDSMSIFKYLRYFTRTILDARSGTDAPTTWRKSGWS

SEQ ID NO: 749 - protein, 126 aa, Homo sapiens
MADEIAKAQVARPGGDTIFGKIIRKEIPAKIIFEDDRCLAFHDISPQAPTHFLVIPKKHISQISVAEDDDESLLGHLMIVGKKCAADLGLNKGYRMVVNEGSDGGQSVYHVHLHVLGGRQMHWPPG

SEQ ID NO: 750 - protein, 802 aa, Homo sapiens
MLGARAWLGRVLLLPRAGAGLAASRRCPGVWPRTWPHRSPSRGSSSRDKDRSATVSSSVPMPAGGKGSHPSSTPQRVPNRLIHEKSPYLLQHAYNPVDWYPWGQEAFDKARKENKPIFLSVGYSTCHWCHMMEEESFQNEEIGRLLSEDFVSVKVDREERPDVDKVYMTFVQATSSGGGWPMNVWLTPNLQPFVGGTYFPPEDGLTRVGFRTVLLRIREQWKQNKNTLLENSQRVTTALLARSEISVGDRQLPPSAATVNNRCFQQLDEGYDEEYGGFAEAPKFPTPVILSFLFSYWLSHRLTQDGSRAQQMALHTLKMMANGGIRDHVGQGFHRYSTDRQWHVPHFEKMLYDQAQLAVAYSQAFQLSGDEFYSDVAKGILQYVARSLSHRSGGFYSAEDADSPPERGQRPKEGAYYVWTVKEVQQLLPEPVLGATEPLTSGQLLMKHYGLTEAGNISPSQDPKGELQGQNVLTVRYSLELTAARFGLDVEAVRTLLNSGLEKLFQARKHRPKPHLDSKMLAAWNGLMVSGYAVTGAVLGQDRLINYATNGAKFLKRHMFDVASGRLMRTCYTGPGGTVEHSNPPCWGFLEDYAFVVRGLLDLYEASQESAWLEWALRLQDTQDKLFWDSQGGGYFCSEAELGAGLPLRLKDDQDGAEPSANSVSAHNLLRLHGFTGHKDWMDKCVCLLTAFSERMRRVPVALPEMVRALSAQQQTLKQIVICGDRQAKDTKALVQCVHSVYIPNKVLILADGDPSSFLSRQLPFLSTLRRLEDQATAYVCENQACSVPITDPCELRKLLHP

SEQ ID NO: 751 - protein, 366 aa, Homo sapiens; identical to SEQ ID NO: 551

SEQ ID NO: 752 - protein, 519 aa, Homo sapiens
MAEERVATRTQFPVSTESQKPRQKKAPEFPILEKQNWLIHLHYIRKDYEACKAVIKEQLQETQGLCEYAIYVQALIFRLEGNIQESLELFQTCAVLSPQSADNLKQVARSLFLLGKHKAAIEVYNEAAKLNQKDWEISHNLGVCYIYLKQFNKAQDQLHNALNLNRHDLTYIMLGKIHLLEGDLDKAIEVYKKAVEFSPENTELLTTLGLLYLQLGIYQKAFEHLGNALTYDPTNYKAILAAGSMMQTHGDFDVALTKYRVVACAVPESPPLWNNIGMCFFGKKKYVAAISCLKRANYLAPFDWKILYNLGLVHLTMQQYASAFHFLSAAINFQPKMGELYMLLAVALTNLEDIENAKRAYAEAVHLDKCNPLVNLNYAVLLYNQGEKKNALAQYQEMEKKVSLLKDNSSLEFDSEMVEMAQKLGAALQVGEALVWTKPVKDPKSKHQTTSTSKPASFQQPLGSNQALGQAMSSAAAYRTLPSGAGGTSQFTKPPSLPLEPEPAVESSPTETSEQIREK

SEQ ID NO: 753 - protein, 1374 aa, Homo sapiens
MSTEADEGITFSVPPFAPSGFCTIPEGGICRRGGAAAVGEGEEHQLPPPPPGSFWNVESAAAPGIGCPAATSSSSATRGRGSSVGGGSRRTTVAYVINEASQGQLVVAESEALQSLREACETVGATLETLHFGKLDFGETTVLDRFYNADIAVVEMSDAFRQPSLFYHLGVRESFSMANNIILYCDTNSDSLQSLKEIICQKNTMCTGNYTFVPYMITPHNKVYCCDSSFMKGLTELMQPNFELLLGPICLPLVDRFIQLLKVAQASSSQYFRESILNDIRKARNLYTGKELAAELARIRQRVDNIEVLTADIVINLLLSYRDIQDYDSIVKLVETLEKLPTFDLASHHHVKFHYAFALNRRNLPGDRAKALDIMIPMVQSEGQVASDMYCLVGRIYKDMFLDSNFTDTESRDHGASWFKKAFESEPTLQSGINYAVLLLAAGHQFESSFELRKVGVKLSSLLGKKGNLEKLQSYWEVGFFLGASVLANDHMRVIQASEKLFKLKTPAWYLKSIVETILIYKHFVKLTTEQPVAKQELVDFWMDFLVEATKTDVTVVRFPVLILEPTKIYQPSYLSINNEVEEKTISIWHVLPDDKKGIHEWNFSASSVRGVSISKFEERCCFLYVLHNSDDFQIYFCTELHCKKFFEMVNTITEEKGRSTEEGDCESDLLEYDYEYDENGDRVVLGKGTYGIVYAGRDLSNQVRIAIKEIPERDSRYSQPLHEEIALHKHLKHKNIVQYLGSFSENGFIKIFMEQVPGGSLSALLRSKWGPLKDNEQTIGFYTKQILEGLKYLHDNQIVHRDIKGDNVLINTYSGVLKISDFGTSKRLAGINPCTETFTGTLQYMAPEIIDKGPRGYGKAADIWSLGCTIIEMATGKPPFYELGEPQAAMFKVGMFKVHPEIPESMSAEAKAFILKCFEPDPDKRACANDLLVDEFLKVSSKKKKTQPKLSALSAGSNEYLRSISLPVPVLVEDTSSSSEYGSVSPDTELKVDPFSFKTRAKSCGERDVKGIRTLFLGIPDENFEDHSAPPSPEEKDSGFFMLRKDSERRATLHRILTEDQDKIVRNLMESLAQGAEEPKLKWEHITTLIASLREFVRSTDRKIIATTLSKLKLELDFDSHGISQVQVVLFGFQDAVNKVLRNHNIKPHWMFALDSIIRKAVQTAITILVPELRPHFSLASESDTADQEDLDVEDDHEEQPSNQTVRRPQAVIEDAVATSGVSTLSSTVSHDSQSAHRSLNVQLGRMKIETNRLLEELVRKEKELQALLHRAIEEKDQEIKHLKLKSQPIEIPELPVFHLNSSGTNTEDSELTDWLRVNGADEDTISRFLAEDYTLLDVLYYVTRDDLKCLRLRGGMLCTLWKAIIDFRNKQT

SEQ ID NO: 754 - protein, 443 aa, Homo sapiens
MDFPCLWLGLLLPLVAALDFNYHRQEGMEAFLKTVAQNYSSVTHLHSIGKSVKGRNLWVLVVGRFPKEHRIGIPEFKYVANMHGDETVGRELLLHLIDYLVTSDGKDPEITNLINSTRIHIMPSMNPDGFEAVKKPDCYYSIGRENYNQYDLNRNFPDAFEYNNVSRQPETVAVMKWLKTETFVLSANLHGGALVASYPFDNGVQATGALYSRSLTPDDDVFQYLAHTYASRNPNMKKGDECKNKMNFPNGVTNGYSWYPLQGGMQDYNYIWAQCFEITLELSCCKYPREEKLPSFWNNNKASLIEYIKQVHLGVKGQVFDQNGNPLPNVIVEVQDRKHICPYRTNKYGEYYLLLLPGSYIINVTVPGHDPHITKVIIPEKSQNFSALKKDILLPFQGQLDSIPVSNPSCPMIPLYRNLPDHSAATKPSLFLFLVSLLHIFFK

SEQ ID NO: 755 - protein, 263 aa, Homo sapiens
MEINTKLLISVTCISFFTFQLLFYFVSYWFSAKVSPGFNSLSFKKKIEWNSRVVSTCHSLVVGIFGLYIFLFDEATKADPLWGGPSLANVNIAIASGYLISDLSIIILYWKVIGDKFFIMHHCASLYAYYLVLKNGVLAYIGNFRLLAELSSPFVNQRWFFEALKYPKFSKAIVINGILMTVVFFIVRIASMLPHYGFMYSVYGTEPYIRLGVLIQLSWVISCVVLDVMNVMWMIKISKGCIKVISHIRQEKAKNSLQNGKLD

SEQ ID NO: 756 - protein, 1529 aa, Homo sapiens
MRGVGWQMLSLSLGLVLAILNKVAPQACPAQCSCSGSTVDCHGLALRSVPRNIPRNTERLDLNGNNITRITKTDFAGLRHLRVLQLMENKISTIERGAFQDLKELERLRLNRNHLQLFPELLFLGTAKLYRLDLSENQIQAIPRKAFRGAVDIKNLQLDYNQISCIEDGAFRALRDLEVLTLNNNNITRLSVASFNHMPKLRTFRLHSNNLYCDCHLAWLSDWLRQRPRVGLYTQCMGPSHLRGHNVAEVQKREFVCSGHQSFMAPSCSVLHCPAACTCSNNIVDCRGKGLTEIPTNLPETITEIRLEQNTIKVIPPGAFSPYKKLRRIDLSNNQISELAPDAFQGLRSLNSLVLYGNKITELPKSLFEGLFSLQLLLLNANKINCLRVDAFQDLHNLNLLSLYDNKLQTIAKGTFSPLRAIQTMHLAQNPFICDCHLKWLADYLHTNPIETSGARCTSPRRLANKRIGQIKSKKFRCSAKEQYFIPGTEDYRSKLSGDCFADLACPEKCRCEGTTVDCSNQKLNKIPEHIPQYTAELRLNNNEFTVLEATGIFKKLPQLRKINFSNNKITDIEEGAFEGASGVNEILLTSNRLENVQHKMFKGLESLKTLMLRSNRITCVGNDSFIGLSSVRLLSLYDNQITTVAPGAFDTLHSLSTLNLLANPFNCNCYLAWLGEWLRKKRIVTGNPRCQKPYFLKEIPIQDVAIQDFTCDDGNDDNSCSPLSRCPTECTCLDTVVRCSNKGLKVLPKGIPRDVTELYLDGNQFTLVPKELSNYKHLTLIDLSNNRISTLSNQSFSNMTQLLTLILSYNRLRCIPPRTFDGLKSLRLLSLHGNDISVVPEGAFNDLSALSHLAIGANPLYCDCNMQWLSDWVKSEYKEPGIARCAGPGEMADKLLLTTPSKKFTCQGPVDVNILAKCNPCLSNPCKNDGTCNSDPVDFYRCTCPYGFKGQDCDVPIHACISNPCKHGGTCHLKEGEEDGFWCICADGFEGENCEVNVDDCEDNDCENNSTCVDGINNYTCLCPPEYTGELCEEKLDFCAQDLNPCQHDSKCILTPKGFKCDCTPGYVGEHCDIDFDDCQDNKCKNGAHCTDAVNGYTCICPEGYSGLFCEFSPPMVLPRTSPCDNFDCQNGAQCIVRINEPICQCLPGYQGEKCEKLVSVNFINKESYLQIPSAKVRPQTNITLQIATDEDSGILLYKGDKDHIAVELYRGRVRASYDTGSHPASAIYSVETINDGNFHIVELLALDQSLSLSVDGGNPKIITNLSKQSTLNFDSPLYVGGMPGKSNVASLRQAPGQNGTSFHGCIRNLYINSELQDFQKVPMQTGILPGCEPCHKKVCAHGTCQPSSQAGFTCECQEGWMGPLCDQRTNDPCLGNKCVHGTCLPINAFSYSCKCLEGHGGVLCDEEEDLFNPCQAIKCKHGKCRLSGLGQPYCECSSGYTGDSCDREISCRGERIRDYYQKQQGYAACQTTKKVSRLECRGGCAGGQCCGPLRSKRRKYSFECTDGSSFVDEVEKVVKCGCTRCVS

SEQ ID NO: 757 - protein, 259 aa, Homo sapiens
MALCALSRLWPGAQAGCAEAGRCCPGRDPACFARGWRLDRVYGTCFCDQACRFTGDCCFDYDRACPARPCFVGEWSPWSGCADQCKPTTRVRRRSVQQEPQNGGAPCPPLEERAGCLEYSTPQGQDCGHTYVPAFITTSAFNKERTRQATSPHWSTHTEDAGYCMEFKTESLTPHCALENWPLTRWMQYLREGYTVCVDCQPPAMNSVSLRCSGDGLDSDGNQTLHWQAIGNPRCQGTWKKVRRVDQCSCPAVHSFIFI

SEQ ID NO: 758 - protein, 1425 aa, Homo sapiens
MENYFQAEAYNLDKVLDEFEQNEDETVSSTLLDTKWNKILDPPSHRLSFNPTLASVNESAVSNESQPQLKVFSLAHSAPLTTEEEDHCANGQDCNLNPEIATMWIDENAVAEDQLIKRNYSWDDQCSAVEVGEKKCGNLACLPDEKNVLVVAVMHNCDKRTLQNDLQDCNNYNSQSLMDAFSCSLDNENRQTDQFSFSINESTEKDMNSEKQMDPLNRPKTEGRSVNHLCPTSSDSLASVCSPSQLKDDGSIGRDPSMSAITSLTVDSVISSQGTDGCPAVKKQENYIPDEDLTGKISSPRTDLGSPNSFSHMSEGILMKKEPAEESTTEESLRSGLPLLLKPDMPNGSGRNNDCERCSDCLVPNEVRADENEGYEHEETLGTTEFLNMTEHFSESQDMTNWKLTKLNEMNDSQVNEEKEKFLQISQPEDTNGDSGGQCVGLADAGLDLKGTCISESEECDFSTVIDTPAANYLSNGCDSYGMQDPGVSFVPKTLPSKEDSVTEEKEIEESKSECYSNIYEQRGNEATEGSGLLLNSTGDLMKKNYLHNFCSQVPSVLGQSSPKVVASLPSISVPFGGARPKQPSNLKLQIPKPLSDHLQNDFPANSGNNTKNKNDILGKAKLGENSATNVCSPSLGNISNVDTNGEHLESYEAEISTRPCLALAPDSPDNDLRAGQFGISARKPFTTLGEVAPVWVPDSQAPNCMKCEARFTFTKRRHHCRACGKVFCASCCSLKCKLLYMDRKEARVCVICHSVLMNAQAWENMMSASSQSPNPNNPAEYCSTIPPLQQAQASGALSSPPPTVMVPVGVLKHPGAEVAQPREQRRVWFADGILPNGEVADAAKLTMNGTSSAGTLAVSHDPVKPVTTSPLPAETDICLFSGSITQVGSPVGSAMNLIPEDGLPPILISTGVKGDYAVEEKPSQISVMQQLEDGGPDPLVFVLNANLLSMVKIVNYVNRKCWCFTTKGMHAVGQSEIVILLQCLPDEKCLPKDIFNHFVQLYRDALAGNVVSNLGHSFFSQSFLGSKEHGGFLYVTSTYQSLQDLVLPTPPYLFGILIQKWETPWAKVFPIRLMLRLGAEYRLYPCPLFSVRFRKPLFGETGHTIMNLLADFRNYQYTLPVVQGLVVDMEVRKTSIKIPSNRYNEMMKAMNKSNEHVLAGGACFNEKADSHLVCVQNDDGNYQTQAISIHNQPRKVTGASFFVFSGALKSSSGYLAKSSIVEDGVMVQITAENMDSLRQALREMKDFTITCGKADAEEPQEHIHIQWVDDDKNVSKGVVSPIDGKSMETITNVKIFHGSEYKANGKVIRWTEVFFLENDDQHNCLSDPADHSRLTEHVAKAFCLALCPHLKLLKEDGMTKLGLRVTLDSDQVGYQAGSNGQPLPSQYMNDLDSALVPVIHGGACQLSEGPVVMELIFYILENIV

SEQ ID NO: 759 - protein, 873 aa, Homo sapiens; identical to SEQ ID NO: 534

SEQ ID NO: 760 - protein, 674 aa, Homo sapiens
MPSYTVTVATGSQWFAGTDDYIYLSLVGSAGCSEKHLLDKPFYNDFERGAVDSYDVTVDEELGEIQLVRIEKRKYWLNDDWYLKYITLKTPHGDYIEFPCYRWITGDVEVVLRDGRAKLARDDQIHILKQHRRKELETRQKQYRWMEWNPGFPLSIDAKCHKDLPRDIQFDSEKGVDFVLNYSKAMENLFINRFMHMFQSSWNDFADFEKIFVKISNTISERVMNHWQEDLMFGYQFLNGCNPVLIRRCTELPEKLPVTTEMVECSLERQLSLEQEVQQGNIFIVDFELLDGIDANKTDPCTLQFLAAPICLLYKNLANKIVPIAIQLNQIPGDENPIFLPSDAKYDWLLAKIWVRSSDFHVHQTITHLLRTHLVSEVFGIAMYRQLPAVHPIFKLLVAHVRFTIAINTKAREQLICECGLFDKANATGGGGHVQMVQRAMKDLTYASLCFPEAIKARGMESKEDIPYYFYRDDGLLVWEAIRTFTAEVVDIYYEGDQVVEEDPELQDFVNDVYVYGMRGRKSSGFPKSVKSREQLSEYLTVVIFTASAQHAAVNFGQYDWCSWIPNAPPTMRAPPPTAKGVVTIEQIVDTLPDRGRSCWHLGAVWALSQFQENELFLGMYPEEHFIEKPVKEAMARFRKNLEAIVSVIAERNKKKQLPYYYLSPDRIPNSVAI

SEQ ID NO: 761 - protein, 350 aa, Homo sapiens
MCRCPPEHHDGRMTSAEVGAAAGGAQAAGPPEWPPGSPQALRQPGRARVAMAALVWLLAGASMSSLNKWIFTVHGFGRPLLLSALHMLVAALACHRGARRPMPGGTRCRVLLLSLTFGTSMACGNVGLRAVPLDLAQLVTTTTPLFTLALSALLLGRRHHPLQLAAMGPLCLGAACSLAGEFRTPPTGCGFLLAATCLRGLKSVQQSALLQEERLDAVTLLYATSLPSFCLLAGAALVLEAGVAPPPTAGDSRLWACILLSCLLSVLYNLASFSLLALTSALTVHVLGNLTVVGNLILSRLLFGSRLSALSYVGIALTLSGMFLYHNCEFVASWAARRGLWRRDQPSKGL

SEQ ID NO: 762 - protein, 960 aa, Homo sapiens
MRVNEKYSTLPAEDRSVHIINICAIEDIGYLPSEGTLLNSLSVDPDAECKYGLYFRDGRRKVDYILVYHHKRPSGNRTLVRRVQHSDTPSGARSVKQDHPLPGKGASLDAGSGEPPMDYHEDDKRFRREEYEGNLLEAGLELERDEDTKIHGVGFVKIHAPWNVLCREAEFLKLKMPTKKMYHINETRGLLKKINSVLQKITDPIQPKVAEHRPQTMKRLSYPFSREKQHLFDLSDKDSFFDSKTRSTIVYEILKRTTCTKAKYSMGITSLLANGVYAAAYPLHDGDYNGENVEFNDRKLLYEEWARYGVFYKYQPIDLVRKYFGEKIGLYFAWLGVYTQMLIPASIVGIIVFLYGCATMDENIPSMEMCDQRHNITMCPLCDKTCSYWKMSSACATARASHLFDNPATVFFSVFMALWAATFMEHWKRKQMRLNYRWDLTGFEEEEEAVKDHPRAEYEARVLEKSLKKESRNKETDKVKLTWRDRFPAYLTNLVSIIFMIAVTFAIVLGVIIYRISMAAALAMNSSPSVRSNIRVTVTATAVIINLVVIILLDEVYGCIARWLTKIEVPKTEKSFEERLIFKAFLLKFVNSYTPIFYVAFFKGRFVGRPGDYVYIFRSFRMEECAPGGCLMELCIQLSIIMLGKQLIQNNLFEIGIPKMKKLIRYLKLKQQSPPDHEECVKRKQRYEVDYNLEPFAGLTPEYMEMIIQFGFVTLFVASFPLAPLFALLNNIIEIRLDAKKFVTELRRPVAVRAKDIGIWYNILRGIGKLAVIINAFVISFTSDFIPRLVYLYMYSKNGTMHGFVNHTLSSFNVSDFQNGTAPNDPLDLGYEVQICRYKDYREPPWSENKYDISKDFWAVLAARLAFVIVFQNLVMFMSDFVDWVIPDIPKDISQQIHKEKVLMVELFMREEQDKQQLLETWMEKERQKDEPPCNHHNTKACPDSLGSPAPSHAYHGGVL

SEQ ID NO: 763 - protein, 739 aa, Homo sapiens
MSSESKEQHNVSPRDSAEGNDSYPSGIHLELQRESSTDFKQFETNDQCRPYHRILIERQEKSDTNFKEFVIKKLQKNCQCSPAKAKNMILGFLPVLQWLPKYDLKKNILGDVMSGLIVGILLVPQSIAYSLLAGQEPVYGLYTSFFASIIYFLLGTSRHISVGIFGVLCLMIGETVDRELQKAGYDNAHSAPSLGMVSNGSTLLNHTSDRICDKSCYAIMVGSTVTFIAGVYQVAMGFFQVGFVSVYLSDALLSGFVTGASFTILTSQAKYLLGLNLPRTNGVGSLITTWIHVFRNIHKTNLCDLITSLLCLLVLLPTKELNEHFKSKLKAPIPIELVVVVAATLASHFGKLHENYNSSIAGHIPTGFMPPKVPEWNLIPSVAVDAIAISIIGFAITVSLSEMFAKKHGYTVKANQEMYAIGFCNIIPSFFHCFTTSAALAKTLVKESTGCHTQLSGVVTALVLLLVLLVIAPLFYSLQKSVLGVITIVNLRGALRKFRDLPKMWSISRMDTVIWFVTMLSSALLSTEIGLLVGVCFSIFCVILRTQKPKSSLLGLVEESEVFESVSAYKNLQTKPGIKIFRFVAPLYYINKECFKSALYKQTVNPILIKVAWKKAAKRKIKEKVVTLGGIQDEMSVQLSHDPLELHTIVIDCSAIQFLDTAGIHTLKEVRRDYEAIGIQVLLAQCNPTVRDSLTNGEYCKKEEENLLFYSVYEAMAFAEVSKNQKGVCVPNGLSLSSD

SEQ ID NO: 764 - protein, 496 aa, Homo sapiens
MASSTGDRSQAVRHGLRAKVLTLDGMNPRVRRVEYAVRGPIVQRALELEQELRQGVKKPFTEVIRANIGDAQAMGQRPITFLRQVLALCVNPDLLSSPNFPDDAKKRAERILQACGGHSLGAYSVSSGIQLIREDVARYIERRDGGIPADPNNVFLSTGASDAIVTVLKLLVAGEGHTRTGVLIPIPQYPLYSATLAELGAVQVDYYLDEERAWALDVAELHRALGQARDHCRPRALCVINPGNPTGQVQTRECIEAVIRFAFEERLFLLADEVYQDNVYAAGSQFHSFKKVLMEMGPPYAGQQELASFHSTSKGYMGECGFRGGYVEVVNMDAAVQQQMLKLMSVRLCPPVPGQALLDLVVSPPAPTDPSFAQFQAEKQAVLAELAAKAKLTEQVFNEAPGISCNPVQGAMYSFPRVQLPPRAVERAQELGLAPDMFFCLRLLEETGICVVPGSGFGQREGTYHFRMTILPPLEKLRLLLEKLSRFHAKFTLEYS

SEQ ID NO: 765 - protein, 757 aa, Homo sapiens
MSENSSDSDSSCGWTVISHEGSDIEMLNSVTPTDSCEPAPECSSLEQEELQALQIEQGESSQNGTVLMEETAYPALEETSSTIEAEEQKIPEDSIYIGTASDDSDIVTLEPPKLEEIGNQEVVIVEEAQSSEDFNMGSSSSSQYTFCQPETVFSSQPSDDESSSDETSNQPSPAFRRRRARKKTVSASESEDRLVAEQETEPSKELSKRQFSSGLNKCVILALVIAISMGFGHFYGTIQIQKRQQLVRKIHEDELNDMKDYLSQCQQEQESFIDYKSLKENLARCWTLTEAEKMSFETQKTNLATENQYLRVSLEKEEKALSSLQEELNKLREQIRILEDKGTSTELVKENQKLKQHLEEEKQKKHSFLSQRETLLTEAKMLKRELERERLVTTALRGELQQLSGSQLHGKSDSPNVYTEKKEIAILRERLTELERKLTFEQQRSDLWERLYVEAKDQNGKQGTDGKKKGGRGSHRAKNKSKETFLGSVKETFDAMKNSTKEFVRHHKEKIKQAKEAVKENLKKFSDSVKSTFRHFKDTTKNIFDEKGNKRFGATKEAAEKPRTVFSDYLHPQYKAPTENHHNRGPTMQNDGRKEKPVHFKEFRKNTNSKKCSPGHDCRENSHSFRKACSGVFDCAQQESMSLFNTVVNPIRMDEFRQIIQRYMLKELDTFCHWNELDQFINKFFLNGVFIHDQKLFTDFVNDVKDYLRNMKEYEVDNDGVFEKLDEYIYRHFFGHTFSPPYGPRSVYIKPCHYSSL

SEQ ID NO: 766 - protein, 946 aa, Homo sapiens
VFGKEYTVGTKAMYSCSEGYHLQAGAEATAECLDTGLWSNRNVPPQCVPVTCPDVSSISVEHGRWRLIFETQYQFQAQLMLICDPGYYYTGQRVIRCQANGKWSLGDSTPTCRIISCGELPIPPNGHRIGTLSVYGATAIFSCNSGYTLVGSRVRECMANGLWSGSEVRCLAGHCGTPEPIVNGHINGENYSYRGSVVYQCNAGFRLIGMSVRICQQDHHWSGKTPFCVLVSCGHPGSPPHSQMSGDSYTVGAVVRYSCIGKRTLVGNSTRMCGLDGHWTGSLPHCSGTSVGVCGDPGIPAHGIRLGDSFDPGTVMRFSCEAGHVLRGSSERTCQANGSWSGSQPECGVISCGNPGTPSNARVVFSDGLVFSSSIVYECREGYYATGLLSRHCSVNGTWTGSDPECLVINCGDPGIPANGLRLGNDFRYNKTVTYQCVPGYMMESHRVSVLSCTKDRTWNGTKPVCKALMCKPPPLIPNGKVVGSDFMWGSSVTYACLEGYQLSLPAVFTCEGNGSWTGELPQCFPVFCGDPGVPSRGRREDRGFSYRSSVSFSCHPPLVLVGSPRRFCQSDGTWSGTQPSCIDPTLTTCADPGVPQFGIQNNSQGYQVGSTVLFRCQKGYLLQGSTTRTCLPNLTWSGTPPDCVPHHCRQPETPTHANVGALDLPSMGYTLIYSCQEGFSLKGGSEHRTCKADGSWTGKPPICLEVRPNGRPINTAREPPLTQALIPGDVFAKNSLWKGAYEYQGKKQPAMLRVTGFQVANSKVNATMIDHSGVELHLAGTYKKEDFHLLLQVYQITGPVEIFMNKFKDDHWALDGHVSSESSGATFIYQGSVKGQGFGQFGFQRLDLRLLESDPESIGRHFASNSSSVAAAILVPFIALIIAGFVLYLYKHRRRPKVPFNGYAGHENTNVRATFENPMYDRNIQPTDIMASEAEFTVSTVCTAV

SEQ ID NO: 767 - protein, 290 aa, Homo sapiens
MADLSFIEDTVAFPEKEEDEEEEEEGVEWGYEEGVEWGLVFPDANGEYQSPINLNSREARYDPSLLDVRLSPNYVVCRDCEVTNDGHTIQVILKSKSVLSGGPLPQGHEFELYEVRFHWGRENQRGSEHTVNFKAFPMELHLIHWNSTLFGSIDEAVGKPHGIAIIALFVQIGKEHVGLKAVTEILQDIQYKGKSKTIPCFNPNTLLPDPLLRDYWVYEGSLTIPPCSEGVTWILFRYPLTISQLQIEEFRRLRTHVKGAELVEGCDGILGDNFRPTQPLSDRVIRAAFQ

SEQ ID NO: 768 - protein, 277 aa, Homo sapiens
MEAPGPAQAAAAESNSREVTEDAADWAPALCPSPEARSPEAPAYRLQDCDALVTMGTGTFGRVHLVKEKTAKHFFALKVMSIPDVIRRKQEQHVHNEKSVLKEVSHPFLIRLFWTWHEERFLYMLMEYVPGGELFSYLRNRGHFSSTTGLFYSAEIICAIEYLHSKEIVYRDLKPENILLDRDGHIKLTDFGFAKKLVDRTWTLCGTPEYLAPEVIQSKGHGRAVDWWALGILIFEMLSGFPPFFDDNPFGIYQKILAGKLYFPRHLDFHVKTGRMM

SEQ ID NO: 769 - protein, 284 aa, Homo sapiens
MEPGNYATLDGAKDIEGLLGAGGGRNLVAHSPLTSHPAAPTLMPAVNYAPLDLPGSAEPPKQCHPCPGVPQGTSPAPVPYGYFGGGYYSCRVSRSSLKPCAQAATLAAYPAETPTAGEEYPSRPTEFAFYPGYPGTYQPMASYLDVSVVQTLGAPGEPRHDSLLPVDSYQSWALAGGWNSQMCCQGEQNPPGPFWKAAFADSSGQHPPDACAFRRGRKKRIPYSKGQLRELEREYAANKFITKDKRRKISAATSLSERQITIWFQNRRVKEKKVLAKVKNSATP

SEQ ID NO: 770 - protein, 1168 aa, Homo sapiens
MSWFSGLLVPKVDERKTAWGERNGQKRSRRRGTRAGGFCTPRYMSCLRDAEPPSPTPAGPPRCPWQDDAFIRRGGPGKGKELGLRAVALGFEDTEVTTTAGGTAEVAPDAVPRSGRSCWRRLVQVFQSKQFRSAKLERLYQRYFFQMNQSSLTLLMAVLVLLTAVLLAFHAAPARPQPAYVALLACAAALFVGLMVVCNRHSFRQDSMWVVSYVVLGILAAVQVGGALAADPRSPSAGLWCPVFFVYIAYTLLPIRMRAAVLSGLGLSTLHLILAWQLNRGDAFLWKQLGANVLLFLCTNVIGICTHYPAEVSQRQAFQETRGYIQARLHLQHENRQQERLLLSVLPQHVAMEMKEDINTKKEDMMFHKIYIQKHDNVSILFADIEGFTSLASQCTAQELVMTLNELFARFDKLAAENHCLRIKILGDCYYCVSGLPEARADHAHCCVEMGVDMIEAISLVREVTGVNVNMRVGIHSGRVHCGVLGLRKWQFDVWSNDVTLANHMEAGGRAGRIHITRATLQYLNGDYEVEPGRGGERNAYLKEQHIETFLILGASQKRKEEKAMLAKLQRTRANSMEGLMPRWVPDRAFSRTKDSKAFRQMGIDDSSKDNRGTQDALNPEDEVDEFLSRAIDARSIDQLRKDHVRRFLLTFQREDLEKKYSRKVDPRFGAYVACALLVFCFICFIQLLIFPHSTLMLGIYASIFLLLLITVLICAVYSCGSLFPKALQRLSRSIVRSRAHSTAVGIFSVLLVFTSAIANMFTCNHTPIRSCAARMLNLTPADITACHLQQLNYSLGLDAPLCEGTMPTCSFPEYFIGNMLLSLLASSVFLHISSIGKLAMIFVLGLIYLVLLLLGPPATIFDNYDLLLGVHGLASSNETFDGLDCPAAGRVALKYMTPVILLVFALALYLHAQQVESTARLDFLWKLQATGEKEEMEELQAYNRRLLHNILPKDVAAHFLARERRNDELYYQSCECVAVMFASIANFSEFYVELEANNEGVECLRLLNEIIADFDEIISEERFRQLEKIKTIGSTYMAASGLNASTYDQVGRSHITALADYAMRLMEQMKHINEHSFNNFQMKIGLNMGPVVAGVIGARKPQYDIWGNTVNVSSRMDSTGVPDRIQVTTDLYQVLAAKGYQLECRGVVKVKGKGEMTTYFLNGGPSS

SEQ ID NO: 771 - protein, 181 aa, Homo sapiens
MGGFFSSIFSSLFGTREMRILILGLDGAGKTTILYRLQVGEVVTTIPTIGFNVETVTYKNLKFQVWDLGGQTSIRPYWRCYYSNTDAVIYVVDSCDRDRIGISKSELVAMLEEEELRKAILVVFANKQDMEQAMTSSEMANSLGLPALKDRKWQIFKTSATKGTGLDEAMEWLVETLKSRQ

SEQ ID NO: 772 - protein, 1383 aa, Homo sapiens
MYATDSRGHSPAFLQPQNGNSRHPSGYVPGKVVPLRPPPPPKSQASAKFTSIRREDRATFAFSPEEQQAQRESQKQKRHKNTFICFAITSFSFFIALAIILGISSKYAPDENCPDQNPRLRNWDPGQDSAKQVVIKEGDMLRLTSDATVHSIVIQDGGLLVFGDNKDGSRNITLRTHYILIQDGGALHIGAEKCRYKSKATITLYGKSDEGESMPTFGKKFIGVEAGGTLELHGARKASWTLLARTLNSSGLPFGSYTFEKDFSRGLNVRVIDQDTAKILESERFDTHEYRNESRRLQEFLRFQDPGRIVAIAVGDSAAKSLLQGTIQMIQERLGSELIQGLGYRQAWALVGVIDGGSTSCNESVRNYENHSSGGKALAQREFYTVDGQKFSVTAYSEWIEGVSLSGFRVEVVDGVKLNLLDDVSSWKPGDQIVVASTDYSMYQAEEFTLLPCSECSHFQVKVKETPQFLHMGEIIDGVDMRAEVGILTRNIVIQGEVEDSCYAENQCQFFDYDTFGGHIMIMKNFTSVHLSYVELKHMGQQQMGRYPVHFHLCGDVDYKGGYRHATFVDGLSIHHSFSRCITVHGTNGLLIKDTIGFDTLGHCFFLEDGIEQRNTLFHNLGLLTKPGTLLPTDRNNSMCTTMRDKVFGNYIPVPATDCMAVSTFWIAHPNNNLINNAAAGSQDAGIWYLFHKEPTGESSGLQLLAKPELTPLGIFYNNRVHSNFKAGLFIDKGVKTTNSSAADPREYLCLDNSARFRPHQDANPEKPRVAALIDRLIAFKNNDNGAWVRGGDIIVQNSAFADNGIGLTFASDGSFPSDEGSSQEVSESLFVGESRNYGFQGGQNKYVGTGGIDQKPRTLPRNRTFPIRGFQIYDGPIHLTRSTFKKYVPTPDRYSSAIGFLMKNSWQITPRNNISLVKFGPHVSLNVFFGKPGPWFEDCEMDGDKNSIFHDIDGSVTGYKDAYVGRMDNYLIRHPSCVNVSKWNAVICSGTYAQVYVQTWSTQNLSMTITRDEYPSNPMVLRGINQKAAFPQYQPVVMLEKGYTIHWNGPAPRTTFLYLVNFNKNDWIRVGLCYPSNTSFQVTFGYLQRQNGSLSKIEEYEPVHSLEELQRKQSERKFYFDSSTGLLFLYLKAKSHRHGHSYCSSQGCERVKIQAATDSKDISNCMAKAYPQYYRKPSVVKRMPAMLTGLCQGCGTRQVVFTSDPHKSYLPVQFQSPDKAETQRGDPSVISVNGTDFTFRSAGVLLLVVDPCSVPFRLTEKTVFPLADVSRIEEYLKTGIPPRSIVLLSTRGEIKQLNISHLLVPLGLAKPAHLYDKGSTIFLGFSGNFKPSWTKLFTSPAGQGLGVLEQFIPLQLDEYGCPRATTVRRRDLELLKQASKAH

SEQ ID NO: 773 - protein, 258 aa, Homo sapiens; identical to SEQ ID NO: 549

SEQ ID NO: 774 - protein, 617 aa, Homo sapiens
MAFPHRPDAPELPDFSMLKRLARDQLIYLLEQLPGKKDLFIEADLMSPLDRIANVSILKQHEVDKLYKVENKPALSSNEQLCFLVRPRIKNMRYIASLVNADKLAGRTRKYKVIFSPQKFYACEMVLEEEGIYGDVSCDEWAFSLLPLDVDLLSMELPEFFRDYFLEGDQRWINTVAQALHLLSTLYGPFPNCYGIGRCAKMAYELWRNLEEEEDGETKGRRPEIGHIFLLDRDVDFVTALCSQVVYEGLVDDTFRIKCGSVDFGPEVTSSDKSLKVLLNAEDKVFNEIRNEHFSNVFGFLSQKARNLQAQYDRRRGMDIKQMKNFVSQELKGLKQEHRLLSLHIGACESIMKKKTKQDFQELIKTEHALLEGFNIRESTSYIEEHIDRQVSPIESLRLMCLLSITENGLIPKDYRSLKTQYLQSYGPEHLLTFSNLRRAGLLTEQAPGDTLTAVESKVSKLVTDKAAGKITDAFSSLAKRSNFRAISKKLNLIPRVDGEYDLKVPRDMAYVFSGAYVPLSCRIIEQVLERRSWQGLDEVVRLLNCSDFAFTDMTKEDKASSESLRLILVVFLGGCTFSEISALRFLGREKGYRFIFLTTAVTNSARLMEAMSEVKA

SEQ ID NO: 775 - protein, 327 aa, Homo sapiens; identical to SEQ ID NO: 547

SEQ ID NO: 776 - protein, 1030 aa, Homo sapiens
MKIPNIGNVMNKFEILGVVGEGAYGVVLKCRHKETHEIVAIKKFKDSEENEEVKETTLRELKMLRTLKQENIVELKEAFRRRGKLYLVFEYVEKNMLELLEEMPNGVPPEKVKSYIYQLIKAIHWCHKNDIVHRDIKPENLLISHNDVLKLCDFGFARNLSEGNNANYTEYVATRWYRSPELLLGAPYGKSVDMWSVGCILGELSDGQPLFPGESEIDQLFTIQKVLGPLPSEQMKLFYSNPRFHGLRFPAVNHPQSLERRYLGILNSVLLDLMKNLLKLDPADRYLTEQCLNHPTFQTQRLLDRSPSRSAKRKPYHVESSTLSNRNQAGKSTALQSHHRSNSKDIQNLSVGLPRADEGLPANESFLNGNLAGASLSPLHTKTYQASSQPGSTSKDLTNNNIPHLLSPKEAKSKTEFDFNIDPKPSEGPGTKYLKSNSRSQQNRHSFMESSQSKAGTLQPNEKQSRHSYIDTIPQSSRSPSYRTKAKSHGALSDSKSVSNLSEARAQIAEPSTSRYFPSSCLDLNSPTSPTPTRHSDTRTLLSPSGRNNRNEGTLDSRRTTTRHSKTMEELKLPEHMDSSHSHSLSAPHESFSYGLGYTSPFSSQQRPHRHSMYVTRDKVRAKGLDGSLSIGQGMAARANSLQLLSPQPGEQLPPEMTVARSSVKETSREGTSSFHTRQKSEGGVYHDPHSDDGTAPKENRHLYNDPVPRRVGSFYRVPSPRPDNSFHENNVSTRVSSLPSESSSGTNHSKRQPAFDPWKSPENISHSEQLKEKEKQGFFRSMKKKKKKSQTVPNSDSPDLLTLQKSIHSASTPSSRPKEWRPEKISDLQTQSQPLKSLRKLLHLSSASNHPASSDPRFQPLTAQQTKNSFSEIRIHPLSQASGGSSNIRQEPAPKGRPALQLPDGGCDGRRQRHHSGPQDRRFMLRTTEQQGEYFCCGDPKKPHTPCVPNRALHRPISSPAPYPVLQVRGTSMCPTLQVRGTDAFSCPTQQSGFSFFVRHVMREALIHRAQVNQAALLTYHENAALTGK

SEQ ID NO: 777 - protein, 1084 aa, Homo sapiens; identical to SEQ ID NO: 561

SEQ ID NO: 778 - protein, 535 aa, Homo sapiens; identical to SEQ ID NO: 559

SEQ ID NO: 779 - protein, 788 aa, Homo sapiens
MGSTDSKLNFRKAVIQLTTKTQPVEATDDAFWDQFWADTATSVQDVFALVPAAEIRAVREESPSNLATLCYKAVEKLVQGAESGCHSEKEKQIVLNCSRLLTRVLPYIFEDPDWRGFFWSTVPGAGRGGQGEEDDEHARPLAESLLLAIADLLFCPDFTVQSHRRSTVDSAEDVHSLDSCEYIWEAGVGFAHSPQPNYIHDMNRMELLKLLLTCFSEAMYLPPAPESGSTNPWVQFFCSTENRHALPLFTSLLNTVCAYDPVGYGIPYNHLLFSDYREPLVEEAAQVLIVTLDHDSASSASPTVDGTTTGTAMDDADPPGPENLFVNYLSRIHREEDFQFILKGIARLLSNPLLQTYLPNSTKKIQFHQELLVLFWKLCDFNKKFLFFVLKSSDVLDILVPILFFLNDARADQSRVGLMHIGVFILLLLSGERNFGVRLNKPYSIRVPMDIPVFTGTHADLLIVVFHKIITSGHQRLQPLFDCLLTIVVNVSPYLKSLSMVTANKLLHLLEAFSTTWFLFSAAQNHHLVFFLLEVFNNIIQYQFDGNSNLVYAIIRKRSIFHQLANLPTDPPTIHKALQRRRRTPEPLSRTGSQEGTSMEGSRPAAPAEPGTLKTSLVATPGIDKLTEKSQVSEDGTLRSLEPEPQQSLEDGSPAKGEPSQAWREQRRPSTSSASGQWSPTPEWVLSWKSKLPLQTIMRLLQVLVPQVEKICIDKGLTDESEILRFLQHGTLVGLLPVPHPILIRKYQANSGTAMWFRTYMWGVIYLRNVDPPVWYDTDVKLFEIQRV

SEQ ID NO: 780 - protein, 444 aa, Homo sapiens
MSSTSPNLQKAIDLASKAAQEDKAGNYEEALQLYQHAVQYFLHVVKYEAQGDKAKQSIRAKCTEYLDRAEKLKEYLKNKEKKAQKPVKEGQPSPADEKGNDSDGEGESDDPEKKKLQNQLQGAIVIERPNVKWSDVAGLEGAKEALKEAVILPIKFPHLFTGKRTPWRGILLFGPPGTGKSYLAKAVATEANNSTFFSISSSDLVSKWLGESEKLVKNLFQLARENKPSIIFIDEIDSLCGSRSENESEAARRIKTEFLVQMQGVGVDNDGILVLGATNIPWVLDSAIRRRFEKRIYIPLPEPHARAAMFKLHLGTTQNSLTEADFRELGRKTDGYSGADISIIVRDALMQPVRKVQSATHFKKVRGPSRADPNHLVDDLLTPCSPGDPGAIEMTWMDVPGDKLLEPVVSMSDMLRSLSNTKPTVNEHDLLKLKKFTEDFGQEG

SEQ ID NO: 781 - protein, 1396 aa, Homo sapiens
MDTKLMCLLFFFSLPPLLVSNHTGRIKVVFTPSICKVTCTKGSCQNSCEKGNTTTLISENGHAADTLTATNFRVVICHLPCMNGGQCSSRDKCQCPPNFTGKLCQIPVHGASVPKLYQHSQQPGKALGTHVIHSTHTLPLTVTSQQGVKVKFPPNIVNIHVKHPPEASVQIHQVSRIDGPTGQKTKEAQPGQSQVSYQGLPVQKTQTIHSTYSHQQVIPHVYPVAAKTQLGRCFQETIGSQCGKALPGLSKQEDCCGTVGTSWGFNKCQKCPKKPSYHGYNQMMECLPGYKRVNNTFCQDINECQLQGVCPNGECLNTMGSYRCTCKIGFGPDPTFSSCVPDPPVISEEKGPCYRLVSSGRQCMHPLSVHLTKQLCCCSVGKAWGPHCEKCPLPGTAAFKEICPGGMGYTVSGVHRRRPIHHHVGKGPVFVKPKNTQPVAKSTHPPPLPAKEEPVEALTFSREHGPGVAEPEVATAPPEKEIPSLDQEKTKLEPGQPQLSPGISTIHLHPQFPGIVIEKTSPPVPVEVAPEASTSSASQVIAPTQVTEINECTVNPDICGAGHCINLPVRYTCICYEGYRFSEQQRKCVDIDECTQVQHLCSQGRCENTEGSFLCICPAGFMASEEGTNCIDVDECLRPDVCGEGHCVNTVGAFRCEYCDSGYRMTQRGRCEDIDECLNPSTCPDEQCVNSPGSYQCVPCTEGFRGWNGQCLDVDECLEPNVCANGDCSNLEGSYMCSCHKGYTRTPDHKHCRDIDECQQGNLCVNGQCKNTEGSFRCTCGQGYQLSAAKDQCEDIDECQHRHLCAHGQCRNTEGSFQCVCDQGYRASGLGDHCEDINECLEDKSVCQRGDCINTAGSYDCTCPDGFQLDDNKTCQDINECEHPGLCGPQGECLNTEGSFHCVCQQGFSISADGRTCEDIDECVNNTVCDSHGFCDNTAGSFRCLCYQGFQAPQDGQGCVDVNECELLSGVCGEAFCENVEGSFLCVCADENQEYSPMTGQCRSRTSTDLDVDVDQPKEEKKECYYNLNDASLCDNVLAPNVTKQECCCTSGAGWGDNCEIFPCPVLGTAEFTEMCPKGKGFVPAGESSSEAGGENYKDADECLLFGQEICKNGFCLNTRPGYECYCKQGTYYDPVKLQCFDMDECQDPSSCIDGQCVNTEGSYNCFCTHPMVLDASEKRCIRPAESNEQIEETDVYQDLCWEHLSDEYVCSRPLVGKQTTYTECCCLYGEAWGMQCALCPLKDSDDYAQLCNIPVTGRRQPYGRDALVDFSEQYTPEADPYFIQDRFLNSFEELQAEECGILNGCENGRCVRVQEGYTCDCFDGYHLDTAKMTCVDVNECDELNNRMSLCKNAKCINTDGSYKCLCLPGYVPSDKPNYCTPLNTALNLEKDSDLE

SEQ ID NO: 782 - protein, 226 aa, Homo sapiens
MFTLLVLLSQLPTVTLGFPHCARGPKASKHAGEEVFTSKEEANFFIHRRLLYNRFDLELFTPGNLERECNEELCNYEEAREIFVDEDKTIAFWQEYSAKGPTTKSDGNREKIDVMGLLTGLIAAGVFLVIFGLLGYYLCITKCNRLQHPCSSAVYERGRHTPSIIFRRPEEAALSPLPPSVEDAGLPSYEQAVALTRKHSVSPPPPYPGHTKGFRVFKKSMSLPSH

SEQ ID NO: 783 - protein, 1914 aa, Homo sapiens
MADGKGDAAAVAGAGAEAPAVAGAGDGVETESMVRGHRPVSPAPGASGLRPCLWQLETELREQEVSEVSSLNYCRSFCQTLLQYASNKNASEHIVYLLEVYRLAIQSFASARPYLTTECEDVLLVLGRLVLSCFELLLSVSESELPCEVWLPFLQSLQESHDALLEFGNNNLQILVHVTKEGVWKNPVLLKILSQQPVETEEVNKLIAQEGPSFLQMRIKHLLKSNCIPQATALSKLCAESKEISNVSSFQQAYITCLCSMLPNEDAIKEIAKVDCKEVLDIICNLESEGQDNTAFVLCTTYLTQQLQTASVYCSWELTLFWSKLQRRIDPSLDTFLERCRQFGVIAKTQQHLFCLIRVIQTEAQDAGLGVSILLCVRALQLRSSEDEEMKASVCKTIACLLPEDLEVRRACQLTEFLIEPSLDGFNMLEELYLQPDQKFDEENAPVPNSLRCELLLALKAHWPFDPEFWDWKTLKRHCHQLLGQEASDSDDDLSGYEMSINDTDVLESFLSDYDEGKEDKQYRRRDLTDQHKEKRDKKPIGSSERYQRWLQYKFFCLLCKRECIEARILHHSKMHMEDGIYTCPVCIKKFKRKEMFVPHVMEHVKMPPSRRDRSKKKLLLKGSQKGICPKSPSAIPEQNHSLNDQAKGESHEYVTFSKLEDCHLQDRDLYPCPGTDCSRVFKQFKYLSVHLKAEHQNNDENAKHYLDMKNRREKCTYCRRHFMSAFHLREHEQVHCGPQPYMCVSIDCYARFGSVNELLNHKQKHDDLRYKCELNGCNIVFSDLGQLYHHEAQHFRDASYTCNFLGCKKFYYSKIEYQNHLSMHNVENSNGDIKKSVKLEESATGEKQDCINQPHLLNQTDKSHLPEDLFCAESANSQIDTETAENLKENSDSNSSDQLSHSSSASMNEELIDTLDHSETMQDVLLSNEKVFGPSSLKEKCSSMAVCFDGTKFTCGFDGCGSTYKNARGMQKHLRKVHPYHFKPKKIKTKDLFPSLGNEHNQTTEKLDAEPKPCSDTNSDSPDEGLDHNIHIKCKREHQGYSSESSICASKRPCTEDTMLELLLRLKHLSLKNSITHGSFSGSLQGYPSSGAKSLQSVSSISDLNFQNQDENMPSQYLAQLAAKPFFCELQGCKYEFVTREALLMHYLKKHNYSKEKVLQLTMFQHRYSPFQCHICQRSFTRKTHLRIHYKNKHQIGSDRATHKLLDNEKCDHEGPCSVDRLKGDCSAELGGDPSSNSEKPHCHPKKDECSSETDLESSCEETESKTSDISSPIGSHREEQEGREGRGSRRTVAKGNLCYILNKYHKPFHCIHKTCNSSFTNLKGLIRHYRTVHQYNKEQLCLEKDKARTKRELVKCKKIFACKYKECNKRFLCSKALAKHCSDSHNLDHIEEPKVLSEAGSAARFSCNQPQCPAVFYTFNKLKHHLMEQHNIEGEIHSDYEIHCDLNGCGQIFTHRSNYSQHVYYRHKDYYDDLFRSQKVANERLLRSEKVCQTADTQGHEHQTTRRSFNAKSKKCGLIKEKKAPISFKTRAEALHMCVEHSELSLYPCMVQGCLSVVKLESSIVRHYKRTHQMSSAYLEQQMENLVVCVKYGTKIKEEPPSEADPCIKKEENRSCESERTEHSHSPGDSSAPIQNTDCCHSSERDGGQKGCIESSSVFDADTLLYRGTLKCNHSSKTTSLEQCNIVQPPPPCKIENSIPNPNGTESGTYFTSFQLPLPRIKESETRQHSSGQENTVKNPTHVPKENFRKHSQPRSFDLKTYKPMGFESSFLKFIQESEEKEDDFDDWEPSEHLTLSNSSQSSNDLTGNVVANNMVNDSEPEVDIPHSSSDSTIHENLTAIPPLIVAETTTVPSLENLRVVLDKALTDCGELALKQLHYLRPVVVLERSKFSTPILDLFPTKKTDELCVGSS

SEQ ID NO: 784 - protein, 1142 aa, Homo sapiens
MTQLYKVALQWMVKSRVISELQEACWDMVSAMAGDIILLLDSDNDGIRTHAIKFVEGLIVTLSPRMADSEIPRRQEHDISLDRIPRDHPYIQYNVLWEEGKAALEQLLKFMVHPAISSINLTTALGSLANIARQRPMFMSEVIQAYETLHANLPPTLAKSQVSSVRKNLKLHLLSVLKHPASLEFQAQITTLLVDLGTPQAEIARNMPSSKDTRKRPRDDSDSTLKKMKLEPNLGEDDEDKDLEPGPSGTSKASAQISGQSDTDITAEFLQPLLTPDNVANLVLISMVYLPEAMPASFQAIYTPVESAGTEAQIKHLARLMATQMTAAGLGPGVEQTKQCKEEPKEEKVVKTESVLIKRRLSAQGQAISVVGSLSSMSPLEEEAPQAKRRPEPIIPVTQPRLAGAGGRKKIFRLSDVLKPLTDAQVEAMKLGAVKRILRAEKAVACSGAAQVRIKILASLVTQFNSGLKAEVLSFILEDVRARLDLAFAWLYQEYNAYLAAGASGSLDKYEDCLIRLLSGLQEKPDQKDGIFTKVVLEAPLITESALEVVRKYCEDESRTYLGMSTLRDLIFKRPSRQFQYLHVLLDLSSHEKDKVRSQALLFIKRMYEKEQLREYVEKFALNYLQLLVHPNPPSVLFGADKDTEVAAPWTEETVKQCLYLYLALLPQNHKLIHELAAVYTEAIADIKRTVLRVIEQPIRGMGMNSPELLLLVENCPKGAETLVTRCLHSLTDKVPPSPELVKRVRDLYHKRLPDVRFLIPVLNGLEKKEVIQALPKLIKLNPIVVKEVFNRLLGTQHGEGNSALSPLNPGELLIALHNIDSVKCDMKSIIKATNLCFAERNVYTSEVLAVVMQQLMEQSPLPMLLMRTVIQSLTMYPRLGGFVMNILSRLIMKQVWKYPKVWEGFIKCCQRTKPQSFQVILQLPPQQLGAVFDKCPELREPLLAHVRSFTPHQQAHIPNSIMTILEASGKQEPEAKEAPAGPLEEDDLEPLTLAPAPAPRPPQDLIGLRLAQEKALKRQLEEEQKLKPGGVGAPSSSSPSPSPSARPGPPPSEEAMDFREEGPECETPGIFISMDDDSGLTEAALLDSSLEGPLPKETAAGGLTLKEERSPQTLAPVGEDAMKTPSPAAEDAREPEAKGNS

SEQ ID NO: 785 - protein, 72 aa, Homo sapiens
KQYKGIVDCIVRIPKDQGVLSFWRGNLANVIRYSPTQALNFAFKDKYKQIFLGGVDKHTQFWRYFAGNLASG

SEQ ID NO: 786 - protein, 302 aa, Homo sapiens
MVTEQEVDAIGQTLVDPKQPLQARFRALFTLRGLGGPGAIAWISQAFDDDSALLKHELAYCLGQMQDARAIPMLVDVLQDTRQEPMVRHEAGEALGAIGDPEVLEILKQYSSDPVIEVAETCQLAVRRLEWLQQHGGEPAAGPYLSVDPAPPAEERDVGRLREALLDESRPLFERYRAMFALRNAGGEEAALALAEGLHCGSALFRHEVGYVLGQLQHEAAVPQLAAALARCTENPMVRHECAEALGAIARPACLAALQAHADDPERVVRESCEVALDMYEHETGRAFQYADGLEQLRGAPS

SEQ ID NO: 787 - protein, 977 aa, Homo sapiens; identical to SEQ ID NO: 548

SEQ ID NO: 788 - protein, 336 aa, Homo sapiens; identical to SEQ ID NO: 562

SEQ ID NO: 789 - protein, 303 aa, Homo sapiens
MADDQGCIEEQGVEDSANEDSVDAKPDRSSFVPSLFSKKKKNVTMRSIKTTRDRVPTYQYNMNFEKLGKCIIINNKNFDKVTGMGVRNGTDKDAEALFKCFRSLGFDVIVYNDCSCAKMQDLLKKASEEDHTNAACFACILLSHGEENVIYGKDGVTPIKDLTAHFRGDRCKTLLEKPKLFFIQACRGTELDDGIQADSGPINDTDANPRYKIPVEADFLFAYSTVPGYYSWRSPGRGSWFVQALCSILEEHGKDLEIMQILTRVNDRVARHFESQSDDPHFHEKKQIPCVVSMLTKELYFSQ

SEQ ID NO: 790 - protein, 476 aa, Homo sapiens; identical to SEQ ID NO: 558

SEQ ID NO: 791 - protein, 470 aa, Homo sapiens
MSRLGALGGARAGLGLLLGTAAGLGFLCLLYSQRWKRTQRHGRSQSLPNSLDYTQTSDPGRHVMLLRAVPGGAGDASVLPSLPREGQEKVLDRLDFVLTSLVALRREVEELRSSLRGLAGEIVGEVRCHMEENQRVARRRRFPFVRERSDSTGSSSVYFTASSGATFTDAESEGGYTTANAESDNERDSDKESEDGEDEVSCETVKMGRKDSLDLEEEAASGASSALEAGGSSGLEDVLPLLQQADELHRGDEQGKREGFQLLLNNKLVYGSRQDFLWRLARAYSDMCELTEEVSEKKSYALDGKEEAEAALEKGDESADCHLWYAVLCGQLAEHESIQRRIQSGFSFKEHVDKAIALQPENPMAHFLLGRWCYQVSHLSWLEKKTATALLESPLSATVEDALQSFLKAEELQPGFSKAGRVYISKCYRELGKNSEARWWMKLALELPDVTKEDLAIQKDLEELEVILRD

SEQ ID NO: 792 - protein, 518 aa, Homo sapiens; identical to SEQ ID NO: 552

SEQ ID NO: 793 - protein, 559 aa, Homo sapiens; identical to SEQ ID NO: 736

SEQ ID NO: 794 - DNA, 20 bp, Homo sapiens
ggagcagcattccatccagc

SEQ ID NO: 795 - DNA, 20 bp, Homo sapiens
catccatgggccggacataa

SEQ ID NO: 796 - DNA, 18 bp, Homo sapiens
ccgcagcaagcaacgaac

SEQ ID NO: 797 - DNA, 19 bp, Homo sapiens
gctttcctctggcggctcc

SEQ ID NO: 798 - DNA, 21 bp, Homo sapiens
tgcgatgtggtcatcatggtg

SEQ ID NO: 799 - DNA, 21 bp, Homo sapiens
cgtgtcattgtcgtctgaggc

SEQ ID NO: 800 - DNA, 20 bp, Homo sapiens
tgttgactcgatccacccca

SEQ ID NO: 801 - DNA, 21 bp, Homo sapiens
tgagctgcaagtttggctgaa

SEQ ID NO: 802 - DNA, 20 bp, Homo sapiens
gcccgacattctgcaagtcc

SEQ ID NO: 803 - DNA, 19 bp, Homo sapiens
ggtgttgccgggaagggtt

SEQ ID NO: 804 - DNA, 42 bp, Homo sapiens
cgactgcgtgtggggtggtgatggaggaggtttaggcagtcg

SEQ ID NO: 805 - DNA, 24 bp, Homo sapiens
attatatttttcggagtgtatcgc

SEQ ID NO: 806 - DNA, 20 bp, Homo sapiens
taacgtacctaccgtcgccc

SEQ ID NO: 807 - DNA, 19 bp, Homo sapiens
gttcgtagttcggggcgtt

SEQ ID NO: 808 - DNA, 20 bp, Homo sapiens
gcgatcctatcaaatccgaa

SEQ ID NO: 809 - DNA, 19 bp, Homo sapiens
tagggagcgttaggttcgg

SEQ ID NO: 810 - DNA, 20 bp, Homo sapiens
cgctataaaacgacgaacga

SEQ ID NO: 811 - DNA, 43 bp, Homo sapiens
cgacatgccgcgttaaagagttcgtttcgtcgagcgcatgtcg

SEQ ID NO: 812 - DNA, 41 bp, Homo sapiens
cgacagccgcgttaaagagttcgtttcgtcgagcgctgtcg

SEQ ID NO: 813 - DNA, 37 bp, Homo sapiens
cgacatgcccgcaaatccaaccgcgccctgcatgtcg

SEQ ID NO: 814 - DNA, 38 bp, Homo sapiens
cgacatgcccgaacccataaccgcgtcgaagcatgtcg
